United States Patent Application Publication US 2025/0325599 A1 - sequence listing, part 8

SEQ ID NO: 4 - DNA, 4204171 bp, Clostridium difficile (residues 2,102,087-4,204,171 of 4,204,171)
  source 1..4204171: mol_type = genomic DNA
cctcatttaaaacaattatctgttctgcatttaagatagtactaattctttgtgcaactattagaactgtactttcagcagtttttgattttaaagccttacgaagagctgcatcagtttttaagtcaagtgctgaaaaactatcatcaaatatataaacttctggattttttgctattgctcttgcaatagaaagtctttgtttttgacctccagatacatttgttccaccttgagaaatttcagttttaaaagcttctggtttagaatctataaattctgtagcttgagctatttcagctgctgttctcatttcttcatctgttgcgtcttttctaccatattttaagttggattctatagtaccagaaaacaatactcccttttgaggtacatatccaattttttcccttaaatcatgttgagaaacattttttatattaactccaccaagtaatatttctccttcagtaacatcaaagaaacgaggaattaaatttataagagttgacttaccactaccagtacttcctataaaggcagttgtttctcctggctttgctgtaaaagatatatttgttaatataggttcttctgcgtctggatacatgaacgaaacatttttaaattcaacaagaccctttttatcttccttaaactcttgtgcctctgatttttctgggtcttttatgcttatatctgacactaatacttcatctatacgtgtagctgaaacggatgctcttggaagcataatagataccattgatatcattaagaatgacattattatttgcattgtatattgtataaatgccatcatatctccaacttgcattgctccagaatcaacactgtatgcacctctccaaactataagaactgtgataaggttcattataagcatcatagcaggcatcatacatgtcataactctatttacaaaaagatttgttttagttaaatttttatttgctttatcaaatctttcttcttcatgtttttcagtactaaaagctctgataactggaataccagtaattatttcacggcttactaagtttaacttatcaacaagcttttgaaccagtttaaacttaggcataaccactgagaataacactacaattaatgataagatagcaactactgctactgctataatccaggccattgaagtatttgtgtttaaaacctttatcactccacctatagccattataggtgcatagaatactattctaagcaacataaccatcaacatttgtatctgttgaatatcatttgtactacgagtaattaatgaagctgtagaaaattcattcatttcagtatttgaaaatgacataacttttctaaatactccacttcttaaatttctacctacacttgctgctactcttgctgctaaaaatcctactgttattgtagctaccatactaatcattgctataccaagcattttagcaccagtaaataatatataattattttgagttttttctgtatcaatacctattttctcatattctgaccttacatatgaaacagagctttgtgttatcatactctctggcatactttcaaagcctttgctcatctctttagtcaatgtatctaactgttcctttggcattgctgataacaatttaaatatatcaacatctccactttgagtagcttgtggtggaagtttactcattaactgagctttcatagcttttacctctttactatcgccctcaagccctgatactattaaaatagctttaccaaaaataacatttaaatcatctatagtgtctttgtctttagtatttaactcataaagagattcatcttttagacctgggtacttatctttatacttaacataatcctttttattcagcaaagtataattatctagtactttatccttactacttttatccataaataaagtaattttatttaattcactctctctaatcacagatggaacagagttttctactccaccttgttgtatacctacatttactatattggatgtgtattctggtaaagaaaggtcacataccgcttgaattaccaatagacagactattattactattgataatgccgatttctttaaatatttaattaatttaaacatacatttcttcccttctgtaatattaattagtctaataacattaaattgaaaaacattattttaaactttaaaaatatttttcatcttcatgcttatgacatcctgcttttaaattatctcgtacttgcattagaagtcttctaagtactattttttcttcttcactaaatcctaaaaaaaactctctttccaattccttgttaaattcttcaactttattacatatttctaaacctttgtctgtcaaaaaaatcctagatactctttggtccttttcatcttgttttctttccacaagtccagctttttccatcctctttatcataactgtagttgtagatgcttttactttccttttatctgctaattctttttgactttgcccatctttcatctttaaagaaaaaagtatttggggttgaccatgatataagcctaatttatcaaaataaaaatgagttcttataaaatatattcgcattaattgcaagaaaacatcatttaatttttcttcagaattgctattcatacttgccctccttattttttatattacttagtcggctaagcattattttactatactgcatgcattttttcaatatatttataaaaaattcatataaatttcatttattaaatatttttatatcatatagttataattttaataaataatagtaagatttttaattagtcagctacttatattttttattgtaaagcttaaaataaaccttttcatatattttcaaataaaaaagttgtcccaaaataaattttgaaacaacatcatattcaacagtatcttgattatataacattacaatactctacttatcttcatatccatttacaacaacgtctaacttcccagtttcaggtgatataattagaccatgtacaataataccatctggaattaaaggatgcccttttattaaatcaatactatcttttacagattcttctgcagaatcgaatccatgtaaccattgttttgtatcaattccagcactacgaagtgtaagtattacatcattagatattcctctatctaaaattttaccaagtaacttatctgtatcaacattacacataccacatccatgatgccctacaaccataacctcatctacatcaaattcgtaaattgcaactaaaacacttctcataatacttccaaaaggatgcattatagtagctcctgcattttttattagtttcacatctccatttttcaaattcatagccttaggcaaaagctcagttaatcttgtatccatacaagataagactactatttttttatttggatgttttgatgtcacatattgttcatattctttgttctctacaaatgatttattatattctaatatctcttcaagttttctcatatgtaatatcaccctctttaaaaatttttttattattatatcactattaaagtacaatatatacacatataatttaatttatatttattaaattattttataagattattactctactataaatcttgtatataacttgtatttataagtatttgtatatttattttttataatctaaactaatattatatattttcattatttttttaattataatttttttaaaattttattctaaatgccttacttataattaattttttatttcacctatatataattagatttaaaaatgtttaccttaccaatataatgattaaactcaaaagtcttattgaaaaattttctatttacataaattgttcaatatataaaatagaaaatttttttaattttcaaaatatattctacatatctaatatgtaattacaataaaaaatgctataattaacatattattaattcgttttattattgtagtatggctatgaaattatgaaaatatttctctaattaaaaatatgatttatccatatttgtttattgtagatacagactatacaaaaataaatagcacttatttcagtataaaaacatatatagtctatatttagactaaaaaagtataaatagtctatataaaacaacttaaactatgaatataatctaaagtggagggataataattggcaaatataggaaaaataataggagatagaataaaagtctatagaacaaaattgggatatagtcaagagtttctagcagaaaaggcaggtttacatccaacatatattggtcagattgaaagagctgagacaaatacatctatcaatattataatgaaaattgctactgctttagacataccacttgaattgttatttgcaaatattattacaacagaaggcgttgataactctgtacctttagaatgttatgaaatgattaataaattaactgaaaaagaacaaattgcaatgctagagttaataaagtgcatcattaaatacaaagaaatataagtgagggaaatagtaacaataatgaattatataggtaaaagacttaaagaagaacgaaaaaaagcaaatttaacttcaaaagaatttgcaaatatggttggagtatcgccttggtatataactcaaatcgaaagtggtaaaaagaatccaagtcttaaaacattcataaaatttgtaaatatattaaatatttctgcagatgttcttataaaagatattacttccactggaaaaacatatttagaaaatgatataaatgaagagttaaaagacttaaattcaagagaactaaatctgatatcacagattatagacatcataaaaaagaataaaatataattctttatattttatataaaaaaaaaggttatttgaaataaataacctttttttgtctttttgtgttaacattgtcttatagtgctaatgagtactattagaccatgttctatggccttattttaatataaaacgattggagataggctatgattgtgattgaaggtagtgataaatttaagattgcaaaagaatatattgatgtagaatatactctttttagcaaagtaacttttaggtatgaaaagttgaaatttaaagataatgctgaattggaaaaaattaagatgtttaaatataaaaatggctacatccctaataaattaaacctttcttttggatatggattctcttcttataaaaagcaaataattagagaaactgtagatactttaagattgacagaaattttttcaagcgagaacatagaagatattaaatttataaaagatggtacaaaaaaattagaaattagcatagagaaagttgtgaaatttaaacgtcgaaaaaaaagaaattatgtttgttgctattgccctgatatgtatagagatataaaactcgacaaagaatctatcaataagatatacaacagaaaaataaaaatagaaagagaagttaatatttttgaagatgaggatgttataataaacaagaaagtattgaagtttccaaagtcttggacaaagaatatgcaaaaatattggttaagtgaaaataagtatcccatacattctactgtaattgatgatgatagatataaatgttgtaatgtacaatatacaaaaaatagagtgataatattatattacatatataaccattaatatacataattacaaaaaaataatgacaaatatacataatacaaatatatcttctactttagataaaacagttattatgaaaacttactatctataaataatagaaatgctagtataccatctataatctaatgtctagtaggttttaatggcatattttaaatatgccatagttgatttataagattttctatatcactttcaaaatacacactaaatagttgcttttcagatataattgcccaatttaaattttactatctgaaaagttttttatatttaatttatatcttcaaaaataccgtctaatatttctatataattaatttaattaatactcttatgtaatagattaagtactgaatttaactctttaaatgatatttgccctggtgctgaaacactttttgcagctccaaaagtcaatgcagaaccaaatatttcaccacacaatctacttataacacccattcctgacattgacattgttattattggtctatctgcataaattttaaacatttcatttgtagcttcaagtagcactaacacatctctttcattttgcggcataacagctactttgggtaaatctgcgcccaattcctgcattctacataaacgagatacaatctcttctttttttggagttttattaaaatcatgattagatataattactttcacttcttttttatgagcaaaattaactacttcatctatgacctcatctcccataaataactctacatctattaaatctactaaacctgtattagaaatttctttattcaaagtagtataataatctcttgatattaatttttctcccccttctactacacttctaaatgtgaataataaagggatatcatgtatataacttcttaattcatagagaacttccttaacttctttaatattttctacattctcaaaaaaatcaactcgccactctataatatccaaacatgcatcttttaactctttagcctcttttataatatcttttttatttttcccaataattggtacacaaattttaggtctaccttctccaatagtaatattttttacttgaacttttcttttcatattctcctccataatcagaaattctataggactttaaattctattttctgcataatttaattatacattaaaaatactatacattataaaaatactaatttaaaaataatttttattctaattcttaaaacaatcccacatattttagaaaaggtactctataatatacaaacacttcttttttacctaaatttattttaacattctataattttcacaatattctttaaattttactcatataaacaatattattctggatgctaatagaattaatctataaatcatagtataattatgcagaaataactcgaatttcactacttataaagagattgaatattaatgaatctaaatcatttgcattacttcagagttttgactaaagttgaacaccatacaaaagtagctactcaattgtttataccccaaccaagcttaagtaatgttatatagattcttgaaaaagaatttggtatctttttatttgaaaaacaaggtagaaatgtttccctcactaaatacggaagtttttttctaacctatgttgataaagcattaggttaattagaaaaagtttacatataaaatatattaaattgttgcaagttttattgttttgatatacaatcaactaaacatataatctttataaaatactatacagttaaaagtctgttttaaaaaaaaatgtataaattataaatcaaaatatagatactatcaaggagtgattctgtgaagagatgtattgtagtagtggaatagtcaaaaacataatatatattaaaggagagatttaaatatgactattccaaattcaaataaggtatatccaagaagtaatgattatcaaactgtatatcttaaaaatgtaataacaagggaaaatatagaagttggagattacacaatatataatgacttttataatgacccaagagattttgagaaaaacaatgtattatatcattaccctataaacaatgataaattaataattggtaagttttgctcaatagcatgtaatgcaaaatttctaatgactagtggaaatcactcaatgaaatcaaaatccacatatacttttcccatcttttatgaagaatggaaactcgatatcaaccatataacggacgcttgggacaataagggtaacattataattggaaatgatgtgtggataggttatgattctataattatgtcaggtgtaaatattggtgatggtgcaattattggaacaagagcagtagttactaatgacgtctcaccgtattctattgttggaggagtacctgcaaaaattataaaaaagagatttaataatgatacaatttcaaaattattagaaattaaatggtgggattggccatataaaaaaattcaatcaaacattaagcatattcaatcaggaaatattgataaattagtttaatattttataatttatttatattaaactttactttaataatccttttataagagctttttcaaaatttgtatattattttaatatatataaatttaatacaacattaaataaaataaaaagtaaagttacttaataaaaagttactttactttttattatttaaattcctgtttttattataataggtaaaattctattaaactagttcacattttcattattattgatatattatatatgaatataccattttgttttttaataaaaaaatcatgctacatcagtagtaagcaactattaatgtagcatgattttttgtatctaaataatcttagtatttacctatcaatatagattgatatatcaaaaactatagtcttctatattcttctctttttagcttttggttacttagatagtaatcaatttcatcaattagacgttgtttatcatcaggtaatacaccttttaaattagcataatttgatgcatgattacttctaaatacaattttttcattagcatctatattctttatcatctctttaatttcttgtaacacagccttatcctctagtattgtaaactctcctgccttaagtaaatcgtaaagttcagtattaggttctaccattaaactaagtacacccacataatctggtgaaattgctcctaacatttttcctgtatcaactgcatgctgatgtgtttttttagttcctccaagacctgctattacagtggctgataatttaatcccactttttttaacttttctaccaacttttattaattgttcactactaaaacctttcttaatatcttctaatacttcattgcttccactttcaagccctagataaatcattttaacaccaagttttcttaattctttaagttcatcatcagattttttctctatagatttaggagagccgtacatagtaattctttcacactctggaaaaacttcttttatatataaaataatatctcttaatttctccattggtattatcaatgcatctccatctgctaagaatattctttctacatgcttataatatcttctaaatatatcaatttcattttttattacttctagtggctttattttaaattttttagatttgtacatactacaaaacgtacatttgttatgagaacatcctagtgtgacttgtattataagactataagcctcacttggtggtctgtaaagtggcatatcgtattccatattaaaatcccccttgtaataaaatattcattctattatattattaatatttactttaaataataacttataaaattatattttttaaattttagtttaagatatattctttaaaaatttaatgatactattggcagtaatattaagttgtttttcttgacttataatagcatcattatctcccttttgttttccatagtctccaaattgtgcatgatttcctccttcaatctcaacataagttgtatcatcaggaagtttttgttttgattctacaagacttttaaaattgactactccatctttgctcccccatatagatataactttttttcctaattctttcaactcatcacccattggataagaagctaaaaatacaacgccttcaattaatttattatcacgtgcaaaatttgatgctgcaactcctcctaatgaatgacctcctattacccaatgttctatgttgttgtaagaatccataactttctgtgccttattagttccaagtatagctagattaagtggcatctttacgattacaacctcatatccactttctgctatttttcttgcaagtggagcataagattctatttctactttagctcctggatacaaaattaaacctttagaaacttttcttccttttggtgtaaatgaaatgttttcatttacagttacttcaactttactattgctgactagagcttcttttgccagcttttgaggttcatatgttttatttatccatatgaaaaagccaagcaaaatcaatacaaatagtatacctattcccttaaatatcttattctttatgttaaattttctattattatttttatcatctttgttctcaacctcatcataaagtaaaggtctctcaagttccatagttatactaaatgtatcatatttcttattacgctttacctttacatctttactcataaatctaacccccataatatttgaatactattatagtttatcctaagtaaattgttttttcaaccaatgaaaaaaatcaatattttaactattttcatataaaattcataaatatatgttttttgttttttatatattattttcttttagtattttataaaacaaatagccatatactttattttaaatatatggctattctataatttaatatctaagctgcttcttttattgaaactttagttatattacttattctatacatttctttgacaccatttagagtttgcagtaagtttagacatattatcttgtcacctagacttttagtatttacaatactctctaaaattacacttcttccttcatcatacttatctacattgtaatttgaaatataattagtatctctcaatattttttcaacatcttcatcttttattttatttttattaacatttatatatagattatacatattacttattagtaatttctgattttctaaaaaatcctcttgatgtttatctttatatatagcatttatcaacataagtctatcttcaataagtgatggtatcaataataaattttttatatagtaaacatcagctacattttctatagacttattgacttcatcaattatatttttaactattcctttatacatttctataacatgttgatagcctgttttagcatcatatggtaatataaacttatttactattaatgcaataattgctcctaatgctacatatgaaatcctgcttatggttaaaacatttgggtctcccataactactgctgaaccaagagctgaaacagttacacataccattaattttctataatcaactacataagagtttatataccctgctaaaagaactattaacgaccttaatgtactatcttttattattgaaaataatacaataaatattacagctcctataaatgtaccttctattctttttctagacctttgtatacaattttctgcgtaaggttgtgttaatgaaaagacagttaacattatccatcttccatctcttaaatggaaataatccataataaaacccgctacagctgtagctaaagcaatctttactgcataagaaaatcttatagaatttaaattaaagtttttcttatatattgatagtcgtttaaattcatgaggtatctttgattttctttcagctttcttttcgtctcttgattttacttttttataatctactaaaaactcatataaattttctaaaacactataaatttcttttaaatttatatttttagtatcctgagcaataacataatctctaaatcctaatatctctttatcagttatggtatctttattttctaaacacatcttaatatagtttatttctttcgttgctacaactagaacatctgatttactatttatgctactttcttctaaaatattttttatatcttcatcttcaaattctttactatcctttttgtatctttccatgattaaacttattctttctaatgaaaataaaatattcattatgtctatacctctaatactgatataaaagtcatcttttctattatcaaaaataaccattttcaaatttttagatatagaatttattctataattacagctatctatttttctcatactagatttaattatagaactatcatcattaatagtattttttaaaagactaattttttctaataattcatcacatatagatatcagttctttatctccgacatttttcatcctatttctattcataacaaattgagcaatcattattataactgctccaacagctaaagccgacaatctcataggaaattcactttttcctacaggtatacttaccataaatatatacattagaccaaaaggtacatatactgctctctttaagtcataactaaatacataccctattataaataatgctataaaatttaataaaactcctaaatacatattttgtactgcaaaaaatgatagtattcctaagattatatttattgctaaatacttcagtaaatttttaattggagaaatagttaaatctctttccaagagtgttagcatagctgttactatacctacacctataagtgtatttttacttccaaataaatatataaatatagaaataaatgctattataaaaataaacaactttgtttttgatattactagtttctttgtcatcatatcccccctaaaaatttcaacaagaccaattttatcatatttgttatcttattcaaaatgcgcttttttacggtaggactttaactttttttatatttagaactatataattcatatataaacgtattttttttatatataaccgatatattttcgtatgctcccatattttttttgtttcaaatattttttcaaaaatataaaaataactctctcaataatactaaaaatgtatttatcaagagagttataatttatacaataaatttaattaagcttttctttacctaatatataagttccaagacccataaataaagctcctccaacaatatttccaagtgttacagctactaaattataaatagctcctccaatagtaactgtacttattgttggtgaaaataatgaaacactataaattgtcatatttgctacactatgctcaaaacctgatgttataaaagcaaataaacataagaatatcataattatttttgcagtatcactattagttctaaacgaacacaacactgatacacatactagaatattacataaaatccctctaaagaaaagagctgtaaatggcatggatgctttactagctgctgtatttgcaaaaaattcagctacaggtcctttgtctactagaccagttcctacaaatataagacctaaaaccaaagctccgattaaattacctacccaactgtatgcccatattttagaagtatcttttatacttacacctttatttaacataccagcagacataaccatattgtttccagtaaataactctgttcccgtcattataaccaaacttagtgctattgcaaatgataaccccattactatcttagtcataggtgaacctgcatcagtcaaaagtcctcctatagtaaatatcaaaagtatacctatacctacataaagtcctgcaaacgcagaagataccaaatattttactttacttgtgtttaataaatttatcttatttatagctgcattagttaatttatccaaagtttctttatgcataattccctcttccttctattaaattttaatttattcaaatatatgttttactcaatttatagatatttaattccactccagtatatgttttcgtacattttagttatttctggaagctctacaccttcaagtgcccattttttaaattccataaatcctgttctatcaattatatatcctatatgttcttttcctcctggtgcatctttatctatatacttttctacatatctataagtattaagtattatctttattatgctgtcctcatctacccataaaagaaaatcttctgctagtctagggtttttctttcctgttctacccattatagctaatctatagtattttttctcatctctagtccatgcatttgttgggcaatttagtacacactctccacatcctatacacttatctttatctcttaccaccttattattttctgtttttaatgctccaacagatattttagaacatttttttacacatgctccacaatttacacatctatctttttcatatattggtaaagccataccaataattccaaagtcattcattctagcttttatacaatcatttggacaaccagttaaagccactttaaaatgtaaatcatttggaaatatagctttttctattcttttagcaaattcagttgtattatattgagcctttggacagactttatttcctatacaagctgctatatttcttgtacctgctgctggataacctgcgtttttctcactttgatttatattcattttttcaataacaggttgtataattttatttatttcttccatatcttccatatttattcctaatatttcaaacccctgtcttgtagttatgtgcacctgtccatttccgtactcacttgcaattttagaaactacagctaaactctcagggtcaataagaccaccaggtactctaactcttaaagaagtctcatattttgtttttgtaattctataagcatttttcattacttttttggtatttaaatctcttatcacaaacttcgccccctaatcaataagatttttagcatatgaataatcaaatactggtccatctaaacatatgtaagtatcatccattttacaatgtccacatttacctattccacaacacatttttctttcataagaaacccaaatgttcttttcatctaaatctctttttaaaaattcttctactgtaaatttcatcatcattggaggtccaactacaactatagaagtattgtttatatctttcatatccaattctggtatgtattttgttactaatcctacattaccactatatccttcctctgctccatctacagtaactaaaatatcaagttttttactccatctctttaaatcatctgcaaataaaatatcttttggtgatttaaatcctactattaatttaaacttttcgcatttttctttattattataaaaatattcaactattcctcttacaggggctaatgcacttcctcctgccactactacaatttctcttccttcataaagggatacatcaaatccatttccataaggacctcttataaaaaaagaatctccttctttataattaaacaactcgctagttacttttcctacatttcttattgtaaagtcaatataatcctctccatatcctgatactgatattggactttcaccgtatttaggtatagatatctcataaaactttccaggcaatacaccttttgtattgcagtttactctaaaagtccattctttatcagtatgtttaactatatctagtatttttgcacttactggtatatatgggttcatttatacttcctccttactaattactaaatcatttattttttctatacactttgaaaatgatatgtattgcggacaggcatcatcacatcttccacaaccaacacacatatgatatccgaatctttttttaaaatcatgtattttatgcatagttttaaatctcattctttcaccttgtttttttctaaaagaatttccacctgctatatctgtatatccatctacttgacaagaagcccaaacccttcttctctcacctacattttcgttttccttatagaaaatatcctgcattgtaaaacatgaacatgttggacatacaaaattacatctaccacatcctatacatcttgtatcatattcatcccatattgaatttcctataatttcatttgaatcaatattctctggcacatctacagatattaaattatcagttacataatcaacattaaattcagttgcttctccattaaatacttcaaattcactatcctttatatctaagtacagtgtatctccttctatatttaatccaattgaataattatcagttttgttagaatccatgctcacacaaaaacagtttctaaaactttccttacaccctacaagtgcaaactttactttatctctgatatttttataaaaataatctttttcttcaccattatttagatatatttcatcaagtctttttataccatttatgtcacaagctcttaagaaaattaaaattttcttgttgtctaaatcgctttccttaaactctttttcagtaaaataaaacaatacttgatttatgggaagtacaacttcttttggtgaaaagtttgctttcttagcaaattccatttcttcaaaagcgtttacctccttgtatcttataacatcagtatctgaaaaagtacctttaaatgggattaaaactggtgcaaatatcttgtagtctttttttagataattcagaccttcattgaacttagatgaatctaattttagtttcatttttatcacctttcttatattttagttttacttacttgctatcttgtttaaatcttaacactttattttctatgcttctgtgataattatcacagtttcaaaaataataaaaaaatattaatagagtttactaatctctgttaatatttttttattatctatattattcgatttcaaatctaatcacttagatacaatcattaaatacaataaaactattatctactcaattttttgaataataaagaatcttatttgcttttttatacaattcaatagggtaaaataaaaattaataaattagacaataaaaaagaatctataaatagattctcttaataatatttttatttaattaaaattctaataatacttttacttaatcataattaattatttttgaaataccttgataattcagtttctttaacataaaaacctttattatcaatcttaataagttcttctttttgcaatacctttatcattctggaaacagtctcccttttacagccaagcatatcagctaaatatgtaactgtaatatttacatttagtaaagtccattctccacagcaaactccaaattctctacttaacctatataattttgctgcaagttttttatctacttttatggatatagaatttttcaactgtctatataaacgtcttattcttctttccatataagaaataatatcctttgtaagttgaaaatcattttgcataatttctaaaaattcttcaatactataataagctacaattgaattttcaaatgcttcacagccaacagtggagtttttagaagagtcaaatgtaatatcatttatgacttccccactatttaatatgaaaattacttttctctctccattttcacttatcttaaaaatagatacctttccttctaaaagtatataaacactgtctaagctatctttttcataaaataaaatttcttttttttgtaatctttttagtttagctttttctttaagttgattcttcgttttagtacttaaattattaaaaattattactttatcaatattataatcttttaatttagacatgtaatatctctccattcctaaatttttaagagagctctataaaacattacaaatttcttattttattcatttttaaacaattttatagcatttgtagttttaattttcctttcaatagcttcattagaaagttcttttactacctgtgtatatactaaatcaataatgaaaaattgtgctaatttagaagatattgaaccagtttccagtactgtttctcctgatacataagataagtgtacatctgaaatatcctttaattcagaatttttattttcagtaattgatataattttagcattattggctcttgcaagctttacagtttttataatctcttctgtttcaccagaatgtgaaattgcaattattaaatctccttcttccattatggaagacatcattatcatcgtatgactgctatcaaaacttacacaattaaggcctattctcataaatttatagtttgaatcctgtgctattataccagaatatccaatgcctatgaagtaaactttctttgcatttattataagccttgcacagtcatgtacatccttactattgattatctctactgtgttctctaaagtggttacatttgaacttaaaagtttttttgctgtatccaaagctggctcatcattttgtatatttttatttataatattttttttattgatagttgatatttcttgtgctaaagtaactttaaaatcctgtaatccattaaaattcattttttttacaaacctagttatagttgcttcaccaatattgctctctttagctatttgtgatattggtttataaaatacatcatctatattttcttttatataagctattaataatttatctgattttgtgactttaaaagttggtgattccaattgttctaaaatactcattaaaaacccttctattctttatattttgtttaaaaaattatataatgctccaagcattcctgcatcattttgtctctttgcaaattctatattagtgtttttgtaaactctctctataagaacctcctttaatgctttgtctatttttggttttaggaacttttcttgtgccataatcccaccacctaaaattaccacttctggatttattacataacatatatttgcgattccaactgctaatgattttatcatattatcgagttcttttaaacaatcttcatcattattctttgctaaatcaaaaattatttttccatttaagtccttttcattcaaattttttatttttgctacttttttaattagactgctagtagatgccaattcttgaaaagaacttccatttatattcatatatcctacttcaccagcgctattactaaacccatttatcagtttattgtttattataatacatccaccaattccagtacctattgttaaacatatagaagatgttgcacctctacctgcgccaagccacacttcaccaagtccagcacaattaacatcattttcaacttcacattttatattaaactctttttctacttctttttttaattgcatacccttataatttggaattaattcttctaatgcaaatagtattttaccttcaactgggtcaaccatacctgcagttgatatacatataccacttatttcattttcctctatatatttttttactatatcttttattttggctaatattccttctccacctttttcctttgcttcagtatcaagacttgatttatcaattataaatccatcttctctaataaaaccatattttattgaagtacctccaacatctatacaaacgtaatttttcataacatatctccatacaaattatttttataaattaacaactctatttaaaattttatattacacaaatcttttacttatcttttccaattcacagatatatttccttgcttctgataagtctatagtatcacttaatacacttttttctttggttatatgatacttataaatatttttacataagtcctctcctaacatattaagaccttcttgagtgtaatgaacatcatcaatagttaatcctctgtcatgaaattgcatagcaattttacttcctacacacagtatatcacattcattacaagcagattcttgagctgctgcaattcgtcttgttctaataaaatattcatcttctccaagccaataaccagttaaacttacaaacattttatcaatcatacattcttctttaagcctatacgcaattttttttagactttctttatagtacaatgcatcactaccatattttgcatcactttcaccttgaatccaaataacgtatttattttctatattataatgtttacttaaggtagtacagcctgtattaaatttttctatagtgtcatttagaaaccagttattatcatgattccagttttttattcttgaaccatcttttgcattgtgaataaaacaaactttatttccagtaagcttattccattcatttgaaaatgcaggtgctatagtaccatcaccttctgaagtctctagctcacatctcatatttataatttcatcagtactcaaatattcaaaacaattttcatttggaatgatgctctcttttggatttcccaatcctctagcattgctttgtcctattaataagaatacatctatattttccataagttaactcctttacaaaattttaagcttttaattattttcaattttctcataaaaaactaaggctgaaaatagtaatctaactaaaatttacgaagtctcactaatcgctgaaagttaaatcactattttcagccctagtggttatataaattatcattatctaaccaaaaccttaaaaatagcttttttgatattttctttttctaaaacttttattcctgtcatatgagcatcttctggataacaaactaaaaaatcaccttttctaagttccatgtatccattatttttaccatcaagaggcaagaaatcgcccttttcttcatatattttttgttctaaattttctataaaatttatatctattcgttcacatccatcaagcatcaaatgaacatctatatacttcttatgagcttcccagaatctatcttctttttcacaagttttatactctacaatattcacaaaaatatcatcaccatctattgtataagtacctttttcataatctattaatgaattatctttagcatattcaaaacatctaagtaaatcttcatgcaatgttgaatatgtcttactatgatttatatttccaaatatcataagcactatctccctatataattataaagtctatttttatacttttatatacaaagtatattatacaatcttatagagtaactaaattatttatctaatcactctataagacaatttatcatttaaatattatttttcataataaacagtagtctcagcttttggtaaagatacttttgctttaactttagcttctattgcactaactattgtacctaccactacagaagtcgtgattgttattagagaatatgcccaagaagttacttctggcatacggtattttaaataaacaactaaaattgctgatactatgaatccaacatatgctcccattttagtcgcttttttacaaaatgcaccaagtacaaatattcctgctaaaacacctagtactagccccataaaactattaaaccattcatatgctgactttatttctccatttgctaatactattgcaacagctatagaaagtatacctacacctaatgatatatattgtgctatcttagtttgcttttccatacttatatcttttgttatgatagtttgtatatctaaagtccaacttgtagcaactgaattaagccctgtcgataaagttgattgagaagctgcatatatcgctgcaagtagtattcctgttatacccactggtaattcataagctatatatgatgcaaatacttggtcttgttgaactgtttgagctaaatctgggttttgagtatagtatataaataaacaagttccaattagataaaatactgttgcaagtcccattgataaaacaccatttccatatgtcattttattaagttgctttatatcagttgttgtagtaaatctttgaactatatcttgactcgatacatatgatgaaaaagtattaagaccagctccaataaatattataaatgcacttgtagatagtatatttttatcaaacataacttcattacttgctaagaacttgtgtccagttgtaagagtatccattactgttccaaaaccaccatttatacttgctattaaatagaacaatgtccctgtaacacctactattaataccataccttgtataaaatctgtccacaagacagcctttaatccacctgtatatgaataaattattgctattacacccataactactatcaatacatttacaggtattcctgtaagaccagctagaaccactgatggaagatacattatgatagacatacgtcctatttgatatattataaacatcaaagctccaagtactctaagacctttactttcgtatctcatttctaagtattcatatgctgtatctatttctaacctactatacagaggtaagaaaaattttattgtcaaaggtattgctataaacatacctaattgtgcaaaccacaaaatccaagtaccaccataagaatttcctgctaatgataaaaatgatattggacttaataatgtggcaaatattgatactgatgtaacccaccacggaatagttccatcacctttgaagaactcttttcccttcatttccttttttgaaaataacaatcctgcaaataaaactgccaataagtaaaccactagtattgcaaaatctatccaagtaaatcctaccatttgactaatcctcccatactaaaagtattttattaaaaatactttctgtatatttcttttgctcttgatttcatttcatcagttgcttctttcataggttgtctacagtatccagcctcaacaccttgttcttcaagtagtaatttaattgtttgatataagccatttcctaatatatctgttattaaatcattagtcacatgttgtacttcaagtgcttctgatattttttcattcttagttaattcgaatatttgtctagctctgacaccgtttacattgaatgtagaaccaattgccccatctacacctaaaactgtagctggtaacatcatttcatcaaatcctgcaaatattaatttatttgggaatgtttttctcattctctctaataagtagaaatctgctgctgtaaacttaacacctattattttttcattttcaaataattctccaaactggtctaaactcatatcaacaccagttaaaaatggtatagagtatattattaatctattatctacagaatttattattgtattataatagtgttttatttcttcaaaatcaaatttatagtaaaaaggtgtaacagcacttattgcatcatatcctaaatcagttgtaaatttagcaagttctacagcttcttttaaattaactgaaccaacttgagctattaattttatttcttctttcacttcatctttagctatttcaaatattcttttcttttcatcagttgaaagcatgaagttttcccctgtacttcctcctacataaagaccatctactttacaaacatctatattgtgtctaattatttgtcttaaccctttttcatttatattcccttccttatcaaatgaaactaataatgctgaataaattcccttcatatctgttgttctcatatctttacctccaattttaattttcaagtatagttaaatataataattttttaatttataaattaatttttaattaatttcaattgctttaacaaatttttctgttattaattgtggtcttgttattgctgaacctactactgatgaatgaacacccaactcaaagaccttttttaaatcttgaggagtatttacctttccttcagctattacaggtatttctaaatctttaactaatctttccattaatacaaaatctggaccttctaatgttttagtatatggagtatatccagatagtgtagttgaaacgcaatctacaccgtactcttgtgctttgatagcctcatcataatttgaaatgtctgccattactagaacaccgttttcttttatatactttataagttcttttaagtcttcattatttggtctaactctattggtagcatctaatgctatcatttcacaccctgttgttaaaagttcatcaacttcttttttagttggcgttatatatatatctgaatcttcatagtttctctttataatacctataacaggaagtccagtaactttttttatttcaataatatcttcaactccttgagctctaattccaacagctccaccttccatagcagccttagccattctccccattataaaaggactatgaagaggttcattttctaaagcttggcatgatactattaatcttccctttaccttatctagcattttttaaattacctcgtttctgaaatttattttcttgatttatgtattaataataacatgaaaactttttctttgcaatattttttcatatttttttctcgcatctatatttttactgatttattttatatattagcttgttttttacatttaaaagaaattttatttcatttttttggtgtttattttcattttatataactactgttataagtccatttaaataatttcaataaaaaaacccatgtatactatacataggtttcccaatattattctaaatccattataatttttcttccacagcatggacaaaattcagcctctgtatctatctcactttcacaataaccacaaattataaaatcatcacattcattttccaattcaaattttttaccacattcagcacaatatttatcatttacatttccaacataaccacactcacaagttacattactttctgccatttccatttcattaatttccatatttttttcataaattaacttatcaagttctagtaactcatcacagaatttatcaaaactattatcattaatagaatcttctctaattttttgatatgtcagtattcccatttccaagaatatctttgctttcttttcttgaatatcatcaatctctctatttaattttgatttttctttatataattcaactttaaattttccactaccaaactttttcttaaccttagaaaatttatcatctactttattattagtatttccttccacagaaattccctccaatcatatttaatcagctgaatttagcttatatcctattaaagatatcacaaaactatatacaaatgaaattacaatagcttgtaagactttaaattgcattattaaagttgttccataattagttgtattaaagaaattaatattactatctagtataaatgtactaaataaagccaatattcccatcaaaaatgcataatatatactaaatactattataggtcttatactatctgtattatacttaaatcttagcttgtatccatttaataataatattaacatagacaatgctcccattgcataaaacattaatttagtatctccaaataaagatgaagaacttaaagtaaacattgatactgttgagtttattatggttactgaaattccatttgcaaaagcccacatataactagctatttgtgggagtatagtaaataaatttaatccatttgaataactactcatatctagttcatttaagtaactactatcagatatagttagtaccaatagtattactaatactaaaacataacctaatatgaatgttcttatagaatttgaaaaaagagataaatacatattttccttttcataactttttttataagtagttatgtatgtacatataaaccctaatacaaatccatttaaaagaacactaaaaaattcataactatattctaatgcatatccatattctaacatactatgtgaactagtttttacattagtaaaaatagataaaatagctaaaactaatccataaaaaattccaactcctagagaatttgctaatacagtttttgaatctctacatctttttctcataaaaattaggtttgatattaataataccaaaatagggattataagtaatatcaacaaacctatattggcatttataaacccagaacccatcatggtagacatagatacactaatttgacccaagttgagagctaggattatatgtgctggatttattaaataactaatatcattaaattgaatagttataatagctttaaatatcaatgcaataataaacaatataaatatggttgtaaatgttgttaaaaatacacctcttttatttgcatgatatgaaagctcttttattttagatttcaagtctagttttgtttcaagtggtcttaatgatgctatttcataaagttcatttccacaaaatttacagtaattatccttagtattattttctttattgcaactagaacaaattttttcttctttacttttaagagtgatatggctattttttatttttctagttggttcacctgtctttttggaataattattatgtgaataattcatattatttattttcttttcacccattttttccctccaagttttactattgtaaattatcaaatataactatatcatataaaacttaattataccttaattggatatatttatctattttatttgtttattgctgttgttttttaacaggtcttgatatttaaatagtttgttaatgcgaactttattatttatattttattatgcttaatttaaatttattctattctttattttcagcagcaaactatctgtaaatcttaattatagtaaagtattaattaataaagttactcaacattagctaataaattttatctatcacaattttagattgttacacacaatatattttgatataattaaatcataaacgaagtattccaaatatctaatgatagaaaggaatacttatttttatgctttatttttaatggaggcttatatgaacttagaaaaaataaaaaaattttttggatttcctctagacaaaaaacacaaagaaaatgttgaaaaagaactctgcaattatctttatcatacgggtaaaatcatttgcataataatagtaatatctcaaataattatgatgatatcaatctcagctagagaaggaggcccttttgccacaccaagacgccaatggtatttttatatgtatgtaacactattttgtgtatcttctgtctttatgtttgtattttcttatctttggaataaaaaaaaggattgttgtacgttttatataaatttatggataatttatgtgacttttttctgcctatggggttgtgtaattactctacttgaccagttaggtggaaatgacctaagtgtatttagttatattatgttagcagctgcagctttctcagtattaaaatttggagaatcagtaatagtttttggaggatgctttttgtttcttaatttattcttacctgggattcaaactataccaggcaatgagtttagtaatattgtcaacacattttttataacatcccttgccatttttgtttctacaatgctatatagaaatcgtgtatttacttactatgataaacttttaattagtcaacaatatgaagaaatatctcatataaataatttacttaacgacaaagttatgacagacgaccttactaaaatgaacaaccgtagataccttgaagatattctacaaaaaaaattaatcagccatgcaaatcaagaacctataactggaatgatgatagatatagattatttcaaacaatttaatgataattatggacatcaaaagggagactattgtctacaaaatattgccaaagtaattttagattttacaagttctgaaaatgaacatgctatacgatatggtggtgaggaattttttatatgtatttttaactgtgatgagacagatgctaaacttaaatcagaatgtttacgaaaaattatagagtcctgcaattttgagcgtgatgatgttcctttaaaatgtgtaactgttagtattggagtttatacaaagaaaattgaaaaggcaataacattaaatgagtttataagtaattgtgataaggctctatatactgcaaaagaacagggacgtaattgtgttgcattttattaaaaagttacatactattatataaacctataagtattatatcgcaaaataaaagtaatcaaattatatatttatagtacaataaaaataacttgcatatctctaaaatagataaatatgcaagtcattttagtgtttatacttaaagttatataagttttattatatataattattaaaattcagcatttttaggagttcttgggaaaggtataacgtctcttatgttagacatacctgtcatatacataattattctttcaaatccaagaccaaatccagagtgagtagcagtaccaaactttctaagttctaaataccaccaataatcttcttctcttaatcccatttcattaattctatctaacaatacatcttctctttcttctctttgagaacctcctacgatttctccaactccaggaactaataaatccattgctctaacagttttaccgtcttcattcattctcatatagaaagcttttatatcttttggataatctgtaacaaacactggacaattatatatttgctccgttatatatctttcatgctcagtttgaaggtcacatccccactcaacaggatactcaaattcatgaccagattcaattaataattccactgctttagtatacgttattctaataaactcagagtttactatcttatttaatctttctaacaatcctttatctataaaactattaaaaaattccatttcttcaggagcattttctaatacatagcttataacatattttatcatatcttctgcaagttccatgttatcttcaaggtctgcaaaaactatttctggctctatcatccaaaattctgaagcatgtcttcctgtataagagttttcagctctaaatgtaggtccaaaagtataaacgtttctaaaagaaagtgccattatctcggcatttagttgaccactaactgttaaattagcctcttttccaaagaaatcttgagtatagtctattttaccatcttcagtttttggaatatcatttaaatccatagttgttattctaaacatttctcctgcaccttcacagtcactacccgttatgattggagaatgtgcatatacaaagtttctttcttggaagaatttgtgtattgcataggcagctattgatcttactctaaatacagctgaaaaagtattacttcttggtcttaaatgtgctatcgttcttaaatattcaagcgtatgtctcttcttttgtagtggatacgaactatctgattccccttctacaactatgctttttgcatgtatttcgactggttgtttagccccttctgtagatactaactctccctctacaagtatagatgagcttattgctaattttcctacctctttaaaattttctactttctcatcaaatactatctgcatatttttaaagaagcttccatcatttagctctataaatccaaaatttttagatactctagatgttcttatccatccagctacttttacagtcttccctatgtactgttctttttctctgtacaattcttttactgttataaattccttttgcattttaaatcctcctagtataattgttattaatttcttttaaatataatttcaataaaaaaagcccttcatccctatataaagggacgaaagactattactctcgcggtaccaccctagttgtcataatgacctcttagttaagcaatgcttaaagcctataacggtgccttccgtctaagtctacttactaaataagctttcgattagaaactccaagatgttcttcaatataaacctcgtattgagctttcaccatcctcaactcgctagaactacattttatatctactcttctcttcacagtatttatcttttattatttctactaattaacaaaattataccaatttataaatttttagtcaataaatttatataattgatactgattgttatttaaaatataataattctaccttgcataatgataataaatacttatcttcattacttctttattacttaaatttccaaaattttataatttacttccattgtcaacccagtcttttgcttcttcgacacccttaattgaaggtattgaaactttactatgaggttttaatttttcaacatcagcccatgctgctgtcgactcatttccaactaaaagtgaacttttaagtcttttattatctttaccttttaatgctcttgcctttttactttccaaaactatcacctctattatttattttgtaatagttttagcaattttacaaataaaattcataagtctaaattataatgatttttaaattaacatcatatcttttcaatacttaatttatacctatttatatacaaaatatttactttgtgtattcaaaatataaaactgtttttttaattttcatatttattttttatgccatttttctactctatctaaagtatttgatacaattaaattactaatcaattataattttacataggttcttatctatagagtatttgctatctgttgaatcgtattttttaaatttaaaatcccatatccctgcgatacatttggatatgtatatatctcaagttttgtagcacccaatattaaatatgtttttaaaacttgtgtaaacaatgataatctcggtacattatcctgtttttctaagtattccatcaataaggctaaaacacctgtgactatagaactgctcactcctgttcctgttcctgtattatatgttccatttttatatgtggatattatatctacacctgaagctactatatctggcttaattcctcttcctctaattggtcctttcgaagaaccaatccacatactatcagtcttattattaaatgtaccaactgtaattacatcatcactagcagcatacatagttatagtagctactgaatcagggtctaaaaaccttgtgtctggagctatcaaatttttatttggtaagtatatgtcatattctccacttattataagttctgaagtcaatcttaaaatccatactccaggttttatatctcttaatcttatctccaaattttcttttccagaggtaatatatggataaataaatctcattgcataagtagtattttctaagttaaattttcctctatatatataaaagtctggagaataccttatatcatgactaacttcacctgaaggagatattatctgtgctcccactttatctggaccattcgtatttagtgttatatcaagagcatagtcatctccatcttgtattattacatcttgaacttctcccacactgctaaatctgccagaataatgaatatctgtattcccttgatttcctgcaccactcactactaccacaccagcactactcaatatattaaaagtatctaatattgaagtagttgctacagcacttgacttaactccaatagtcaaatttattattagtggtttattttctgttcttgctatattagtaacatacgttatagctgctaaaaaatctgaaacactataatttatccttccagcataataagtatctgtatatgattttaatttaactactattaagtctgattctgtagtaatacctctatactgcgaatttatccttccatttccagctaatataccagaaactaaagttccagtacctatattatcttgactcaaacttccatcatttctatttatggctatatttaactgacttcttgtaaattcacttccaaaaataaaaccttctggaggtggatttgtatttgcttcttggtcccataaatatagaactttactagttccatcatcatttataaaatcaggatgcaaataatctataccagaatctataactgctaataaaattcctcttcctgttatatcattatatggattttcataaatataatcagtttcagctgctgttgtaatggtttctccattatttacattattagttatttcaattagactgctcattggttcagattcttcccaccaagcaacttgtattatattatttaaaatagtttcatcaaaatctacaggtacatatattactgcaagctgactatttaaaaccatatacctatttattccattttcttgtagggcagattctatatcaccttgataaattatacaataagatttttccataaatccctcctatcttaaaacatcaaacattcctctaacatccaaaagcccatatccagaatttgtatttggatatactgtgtttgaatcttttctagcaccagcttgcataaaagtttttattttttgcacatatgcttggtttggatatctaccatcaacaaaagtatattggaaatacattgcagcagcaccagctgcatgtgcacttgctgctgctgtaccagttatagttgcatacgtgttcccaggataagcagctattatattgacacctggtgctactatatctggttttaacctgtcttcaatagttggtcctcttgatgaactttgccataaactaccattaatagtattgtaggctcctacagttattaaatcatcttgaatagcaggataatttatagtgtaaaaagggtctacctctctaaatctagttccactttttaaaagttctctatttggaaggtataagttatatcttcctgttataatataaacccctactaatcgaatcttccatacacctctttttgcattctttaaagtaacattagtaaattgctgcccagaaaaagttgttgggtatatatacgttatagaatattcagtcccctctaaatcaaataaacctgttactttattataatttgaaattccaacacttttactttcttcaccagtgggagatactattattacatcagctttatctggtctatttaaccaaagttctaatgataattcttcctcgtcttcatttaactctaattcaacttcaacagaacctccaacatgtggtattattccagatgtatgtgtctgtgtattgccctcatttcctgctcctgctgttatacataaccctctagtaaagaatgctttttcactattgctcctattggttaaacctgccaagctactggtacctaaagacatatttataactagtggtcttctaagttcaaaagcttttttatatgcatactgagatgcagcaaacaacattgcactattataaaaaccatctatcttaccgagttttattattattagctcagaatcttctgctatacctgcatattcactatttacatttccaagccctgagcatataccactcaacatagttccttgaccaacttcatcctgagatagactagggtcattttctgcgatagctcgatttatatcttctcgtgtatattctgtcccaatataaaaaccatcaggtggagttccttcttttgtttggtcccataaatatactatttttgaagtaccatctggataaataaaatctggatgtagatagtctattcctgtatctgcaattgatattagagtccctcttcctgttatattaatattaggattatttttaaagaaatttacgcccatttcttctgttgcaactacacctccaaaagtacctcgattaatttctccaagtaatgtcatctttgtagtcgatacagttcttatgattgaaggaagttgcaaaactcgttgtatactactatagtctgtattatttatagatagtacacctaatgaatcacttatcttaaaaaaattttgactcatacctaacccagctagttcttcttcaaattcgggagtatggactacatctattcctgatagtattcctgattgtctacttgcatttttacttatataaatttcattctctaagtcattatgtatttgtatattataaccatctataaacttatacctattttcctcatctttaaatgacttattaatacttctatatccaatatcctccgtttctaaatcttgatttatactagatagagtgtacaaatctatatctgataaatttaaaaaaccaaatcctgatgaattatttggataagattgattacttaatctccttgctccctttaaaagtaatgcccttaatttctgtgaatacaaaaataaatcatttccatttacaattccccattccataaacaatgaacaaacccctgtaacatgaggtgtagccatgctagttccagttaatgctccacttgtacctcctggtaaaaaagatattatatcttcacctggagctaataaatcaggtttaaaaacacctaattgtgtatctccttcaccagaaaatatagatactatgtctgttcttgaattaaaactacctactgttacaactctacttgctgttccaggaactgttacagtaagctcttgagtaggaatcagaaatctagtatttctatttagtccttcagaagttggcaaatatatatttacattaccagttactatatctattggttcaaatacaattttccataacccaggagttatctgtgtatttgaacttaattgtagagtaactcttcttgtaagagagtacggtgctatagggtaaaaataaccagttattctagtttcacccaaagtatttcttatctcacctgaagttagagagattgcttgtgtttgattgtttgatgggtttaccaaatgtacactaaaatcatcaacaaaatctggccatatatttatgtttaatatacgctctccttccccaactataaactcaacttcttctgtaatattattttgaagcctaatccttttatgacctcctttatctgcattatttccagctgctacaactatattgtttttccaaaataaacacatatcatctatatattgttcaaataaagatgttcctctatgtgaaccttcattacttccataacttatatttaatgtaacaggcattcttaattctaatgccctatctaaaataaatttaattgccctcataaactctgtacttctcgaaaaaatatcggtctgtatatttccaactctaaccactattattctggcatcacttgcaatagttgcacaaatacctgcaacatgtgtcccatgtaaactagttgttgaaataggtatatacatacttccatctattgcattatttatatcttcattagtatataatgttccttctctaaaaccttctggtggatttccttgaatagattggtcccaataatataatatcttagacctcccatcactatctctaaacacaggtagagtataatctattcccgaatcaattataccaattatagttccctttccagttaaaccagttctatttttaaaccccgttattcctgtacttgaaaaactttgcacatcctgagtctgtaatataaaaggcttttctataaattcaatttctggataagttaaaagtgtatttacatcttcttcattacttgatgttattattgcatatgatgaattaagtatctctactgatacacctaattcttcttctaatctcaatatatctccattgtattttacaattaattcataatttattataatcacctcgacttctaaaattattattaatgtatatgttttgtgtaagtctaaaatgtattagactatataattttttaagtttcagttatacaatttataatagatatattaaaaaataaataatgatggtacaattttgaataaatcataccatcatttatatttactttatcttgaaagcattaaatttttcaatgctttttcaagaccttttacagtcagtggaaacatattaaattcactttgtatcattctttgagtttggtaccaataattaattgaatcccatccatctctaagttctggattcatccatacaattttactgtactttctcttaaaccttttaagccattctataccaggtgtgtaattatatggaccacgatagttaccaccaatatgaagtaactcagaaggcgacatagaagcatctccaacaattataactttatagtttttatctatattttttaatatccattcagtattaatagatttacttaaccaacattcaggtgttgtaaataatctatcataaatacagttatggaaataatatatctttacatctttaaaatgatttgatttacttacagactgaaataatgtattacataaagtgctataccccctcattgaaccacctgaatccataagcaataaaagcttcactgtattttttcttggcttctcaaaaaataactttaaatatcctgcattattacaagtctcttcaatagtcttatccaaatcaagctctgtctttggagcatctattctagtagaaaattgacgaagtctctttagtgcaacttgaaattgacgcatatttaaaacttcatcatctctaaaatctctgtattttctttctcctgcaacttcaagaacagctctaccataagtagaatttccacctatacgtataccagtttgcccttttcctgaatgtcctaactcggaagtgcctcctgtgcctatccaataattaccaccattatgaggagagtcttgttcttttattcgttcctccaatttagctcttaatttatcaagatttatatttggattttgttccaatctttcaaactcttctaaatctatatctggttttttaagccaattcataatctcttctggaatttcttcttggtgttctatacctttaaaatactccaaaaacactgcatcaaacttatcaaaatcactttcactttttattaaaatcatcctgcaaagatagtaaaaatttgaaaagtttgaatagcacagccctttatccaatgcttcaattaaagtcatccattcatttaaagatatatttaatcctcttgacctcaataaataaaaaaattcaataaacataattatccagctcctattaactataagtgtctttgcatagattcaatatcctcattattcttaagtagtattcctgcaaaaggaacttctttttctattttttcaataggcattccactcaaagttaatgcttgtatccagtctattaactctgatgtactaggctttttttgtatgtcctttaaacttctaatccaataaaaagtagtcattacttgttccaataggtgttcttctactttatcaaaatgtactttaactatttcttccatcatgtctctatcaggaaattctatataatgaaatatacatcttcttaaaaaagcatctggaagttctttttccgcatttgaagttataataactattggtctttgtttagctcttacagtttcttttgtctcatttatgtaaaactccattttatccaattcccaaagcaagtcatttggaaattctaaatccgccttatctatttcatctattaaaagaattacttgttgatttgagctaaaggcctctcctagtttaccatattttatgtacttgctaatatcatctacaccttctcctccaaattggctatcataaagtctttgaacagtatcatatacataaagcccttcttgtgcttttgtagttgattttatattccaaattactaaatctttttttaattcatttgaaattgcttgtgctagcatagttttacctgttccaggttcgcccttaatcaaaagtggcttttcaagagcaatagcaacattaactgatgccatcaattctggtgatactacataatcactacttcctctaaagttagatatctctttttttatcataaatcctactccttttaaacagtattttctaaatgtatatagactttattactatttttgatataaaaataataatacaatacatttgtatagtattattctaaaattctatatctaaataaaatcacctctaaaatatttaatttttatctttatttgtcataattaaatgaaatatatattttaaagaataataaaagatagcttattgtacaaaatttaaattataaaaacttagtttaatcaaaggcaccactttttttcattttagattatatataaacataatataaataatttttattattttagctataagcataaagttttaacgtatttataatttcatattaatcatactatattaatactgctttttattgtataataagctataaatattaactttaacttagatttaagtatatctaaatttaataaatataagaaaggttgtgttattttgcaagataaaaaaatttatctaaatattgtactcactgtagttgtttcatatatcttgattaaagttattgataattacaaatatttttttggagtgataagtttattaatgtcactactaacaccatttataatagcatttgtattagcatatatattcaacccactagtaaagttcttagaaagtaaattaaattttaagagaatatattcgttacttcttacttatggtgtactcatagttatactaatttcctttatattatttacagttccatccatagtaaatagtttagctgatttagttgctcaaattcctacatacatagataaaacagagcagttcttattcgacttaggtaagagtttacaatcagttgaccctaatacattaaaagagtatggtgacaaaattatgagtgtaatgcctaaatttagtaacttgcttattggttcacttggtgggatatttagcactacattttcagttggaaaatttatagtacaatttcttttaggttttataatttgtttctatatattattagaaaaagaaaaattcttactgtttacaaaaaaagtagtttatatttccctaggtaaaaaatatggagactttataatagaactatgtcaaagcttaaatttaaatattggtaaatactttacaggtaagattttagattcttttatagttggagtactttctggaattggtctttactttttaaaatctgaatatgcactattatttggtacacttatgggtgtcatgaatatggttccatattttggtccagtaataggtatggcaccagttgtaataattaatttattctccaatccaacaattgctttaacttctttaatttacttaataataattcaacaagttgaagttacatttatagagccaaaaatcgtaggtggacaactaggtcttagcccattctttacaatcctagcagttactgttggtggaggattctttggtatacctggtatgattctatctgctcctgtgatgggcgttataaagatatacttctgtgagtttgtaaatcgtagacatgataaaatacaaatggaataaaaatacaatttaattacgattttgtaatcaaaagttacagctgtgtaactgtaatattattctctttaatggtaatatttaattataggaaacatacaatattattaagtaatgaatcttatataattaaacatgaaagagggttttagtatgaaaaaagcacttatatctttattagttttatcttgtttgttattaactgcaccagtaaatgaatcttcttatgcagattctcaaaagaatgttcctgtaagccaaaatactaaattgactcaagaacaagctaaagaacttttagtaaaatacaacaatgaagttgattacatatatcaaggaaatgctagtgattttgaagcattaaaagctaaaaatcttaatggttatgtatttttaccagatgcagatggtgatattggttactttgtaaatgaaaatacttctgagatatattacttccacccaagtggatatcttgaattagttaatcaacaacaaaataataaataactaataaaaaatggatgcaaattgatataaatttgacatccattttctttttattttaaagttgtttctttttataaactttaaatacttttttaatcctgtgcttgctcttttataagtttctttatatctacagcaggttcatcttccatttttataacttttccttcccatgttctaagcataacgtaatctgttccttttgatacaaggtattgcggaagcaaaggagtctttcctcctccttttggcgcatttactatatatgttggtatagccattcctgatgtatatcctcttaaatactccatgatttcaagaccatcatctactgatgtattgaaatgttttgttccctttacatgtttactttggaatatataataaggttttactcttatttttagtaattcttgatttaaacatctcattacaaatttatcattatttattccatttaataatactgcctgatttcctaatggaactcctgcatttgctaacttttcacaagcttctttagattccttagttatttccattggatgattaaaatgagtatttatatatacagggtgatatttttttagcatattgcaaaattcatctgtaattctttgtggcattgtaacaagagtcctagtacctaatctaacataatcaacatgtggtatctctttaagttggctaagaatccactctaaataatcatcttttaatgtaagagcatctccaccagttactagtacatctcttatttcttcattttctctgatatagtctatagattcttggataatagcttttgacttatgagaatcttgttgtccaatatttcttcttctctgacagtgtctacaatacatagcacactcatttgttacatttattattaatctatctgggtatcttctagttatacatcctgctgggtttgtatactcttctcccattgggtccaaatcttcttgctcatcttccaactctatatgtgttggtatagacagtaattttattgggtcacatatatcttctgggtctataagactcaaataatatggagatattgcccatctaaattgagtaccaacctcttttatatattctttttcttttttagttagagttataatttttgataaagtatctacatctgttattctatttgataattgccatttgtagttattccaatcctcttcagttccatttaagatacttaatattttctgttttcgtttatttatctcttcttctttttcaagacctctgttaatcgtttttctagcctgaatataatcatcaatttttgattttaattcagcagctctctctaaggatattctagtttgttcattcataattttttgctatcaaagttaactacttgtattatttgatagcgtcctcctttctgatgtgtttatatcattctgataggcagatttaattttgccatatagattttataacaaatgaaattgaattaatttttgcattttttctgttatttcgcacatttatgaatatttttcaaccttcgtcaataaattacaataaattatgcattttttttaacaaatgattaattttttctatttttaagaattattttaccataaaacgattatattttcaagattattaaaattaaattttttaataaaaagtaaagtatttcattaaataataaaagcggaggtttattataataaatttctccgcctttttatttatttaattaaataatagtaaaataaatttaactcttaagaagtgactttattatattaagccctttttctaattcttctacatcttttggagctgttacacaaatacgaactgcttttggaactgtagagtttcctactgaaaatcgttcagcacaatatacttgaactcctagattttttgcagaaatttcaaatgattttccatccaattcatcaggaagaagtaaccaacgaaaactgcaattcttatcaccaatcaaattataatctgacaaaactttatcagcaacttcatttctttctataattgcatctcttttctcttctataattttatctataataggagaatataataaacgatgtactatttctgctgtaaatggagaaaccattagattcatattatatagtgcattttctaaattttctatatatcgttttggagcaactacaaatgctactctaagaccagcacataaaaatttagatgtactaaaaatatatatagtattatcactagctaaagaaaatatgggagtttgtataccgtctctaaaaatgctatttatagcatcttcaataattattatattatattgctttgctatcttggctatctttttacgagataaatcagacatagtatgtgtcgttggattatgataatctggtataagatatatgccttttatattttcatttttacaataactttcaagatattcaatcgatatttcattattttcttgaggaattgggactaattgaatacctatcattttagctattgacttaattccagaaaaacttaaagaatctgtagcaattctatcaccagctttaaataatcctagtaaagttgcacatatagcattttgccctcctgtagataataatatattttcttcactggtgtatacattatttctttctatccattttgcaattgactttttttgcatatatgtgccagatggagacatgtattgtaaaaacctatccatttctggttgttttagtacatttttaataaagtcaataatatatgtattttgctcatatggaggatgaactgtccctaattcaattatgtcttttgattccgtttgatataataatgtattacttacatttacatcagaagaaatgaatgttccctttcccacttttgcacatattagtcccttttcttcgcaaagtttaaatgctcgtgttattgtacttaagtttaaatctagaaaatctgctaattcccgttgtggaggcagtttatctccaggatttaaatttcctcttttaatatcttcttctaataacattgctaaagttttatatattggtggttttcggttatctaattttggtttccatgtcataggatagttttcaaaagaatttattggcatataattactcctcttaattataattgtactccatacaattttattattgtatgcttctattttagatgctatacttgtatttgtaaatagctatttcaaaataaataaataagagaggtataatatgaagactataggcttaattggtggtatgagttgggaaagtaccattacatattatcaagttattaatacagtaataaaagaaagattaggtggactacactcttctaaatgtatactttacagtgtagattttcaagaaattgaagaatgccaatctagtggaaattgggaaaaaagcgccaaaattttagctgatgctgcaattaaattacaagaggcaggggcagattttattgttatctgtactaatactatgcataaggtatcagataaaatacaagaaagtatacatattccattacttcacatagcagatgtaactgctacagtattaagggaaaaagaaataaaaaaagtggccttattaggtactaaatatacaatggaacaagatttttataaaaatgtaattattaataatggaattgaagtcttaattccaaatgaagaagaccgtataatagtaaatgacacaatatttaacgaactttgcttaggaattatatctgaatcttcaaaaaaagctttcttatctattatagataagcttggcaaacaaggtgcagagggtgttatattaggatgtacagaaataggtcttttaattaaacaaaatgacacttctattccactatttgatacgacagtaatacatgcaatagaagccgcactaagttcaatttaagacaatattgattaataaaaaaaatatctatagatttgtgtaaataagactttttataatttatattactagagattttaaacctatatattgtaacaaaaaaaggatagtataattaccctatactatcctttttcttaatttaatatttaaataaactcaacactttcaatttgtatacaaatctatcttacatttataacatcactattttgagagctatttccattataatttgcaacaacataaatatctagatttaaatctccttcaggaatacttatagtatgctcatttccctgtatatcactttgatatagattaaattctccatctccattagtattattttttacatatatactgtaagtacagtccttatgagatatactactccagttaactctaatgacattattatctctatcaacattagctgatatattttctaccctcatatctttaatattattatcattatttgaatttccatttccattagtaatatttattacattacttggcttagttgtatctgaatcctttttccctatgacataaatatcaaaatctatattttgattacccttcatatctacttctatagttgcatataccttgttagacttacctaaatcactttcatttatagttatagatttaattttcttaaatgattctcctgacaacttatctttaagatatatatcataatcaaagacatctttcatataatcccattcaagtttaataataactttattgtttactattttatgtgaaccaaccaagttttgtatatagtcattcgttatagtttctttgactactgttactgttattactttagatttatctccacaagttattctcaccctatctttaccttctctaagacctacaacatttccattactacttaaacttattgctctttctacaggtaattttgaatctactaactcataatatatttttggtggttctaaaccaggtggagaagttattatatctggtttcaatttttcattttggtcaacttctatttttatatcatccatatttatttcagcaactctagcttgaatcctaaatgttctctcaatttctttatttccacacttagcatatattgtagctttaccaactccaactgcacttactttatttcctttgatttttaaaatattttcattgctactcttataaactggcttatatgattttttaaacttatcataatcaacttctattgtactttctatagtagcactatcaccaacatgttttaaatccccattaatctccatatctagtgattctacctctgggtctactacttttatagtagccttttttaatactcttgaatttttcatgatacccacagaagaatacccaacctttaatgctgtcattttatttccatctatttttaaagtccctgagttatccaatacattaaaccaaatatttggatttttagcatacgaaggaaccttaatatattcacctgtagacaaagtaactgtttcatttaattttactacatatttatctatatctttaacatattccccatctacaatttcaatttctactccctttaccattggtctaagtattccaaatttaaaaaggtagtactgcgcaacaagcaatataggaatagatataattatggcaatttttctgtatttcttattttttacaaatatcatctatccacttccttttagcctaatatataatcatttgttttgtaagcaatctacctaagttaaatattgggataaactggaaaattattatatttcagaatatccctatactaattataaaccataaatttaaaatttaaaactaaaattaatgttaatttcttactattacaatagtctaattttagtgaaataacatttgtcttgtcagctgaaaagttatataattaattaaaaagaaattatacttatattatatgaggaggattttaaattggaaatcaattataaaaaaagaaatttcaaatcatttgctaaaagaaaaaatattgaaatttctgttcaaaggtatcttattgacgcactaagttatatggcacttggtcttttttcgtcccttttaattggaacaattttcaatacattaggagataatttcaatatttctctttttactgaagttataagccctcttgctaaacaggttactggtccagctatagcagtggctattgcgtatggacttcaagcacctccacttgtactattttcttgtgcacttgttggagcttgtggtaatgaattaggaggacctgttggagcatttgtcgctacactttttgctgtagaggttggaaaattagtttcaaaagaaacaaaaatagatatattggttacacctgctgtgacaatactaattggagtacttgtagctgaacttattggtccagctgtttctgcttttatgacttcatttggaaatataataatgcaagctacaactatgcaacctataataatgggagctttagtctctgcacttgttggaatagctcttacattacctataagtagtgcagctatttgtatgatgttaagtttaggtggtcttgctggtggtgcagcaactgtaggttgttgttgccaaatggtaggctttgctgttatgagctttagagaaaatagagttggtggccttgtggcacaaggtcttgggacatctatgttgcaagtacctaatataataaaaaattggaaaatttggataccacctactgtagcttcaatattacttggaccattatctacaacaatattcaaaatggagaatattcctattggttctggtatgggtacttgtggattggttggacaatttggaacagtaactgctatgcaaagtgctggaaaaggaggtatatctatgtgggttggtatacttttacttaattttatacttcctgctattgtaactttgttgatttcagaatttatgagaaaaaaaggtctaataaaacctgaagatttaaaactagatgtataaattaaaaactactccttttacttatataaaagtaaggagtagttttttttatgaaaattccaacattttttttaatagccaatccatagaacctttaacttcattccaaaccactatgttttcatcatagtaatagacagcttctgccttttcttcctctgtaacaaattctctaccaaaagcatttcgccaatctaacaaatataatccaacgtacttatttttacttctagcaaccttaatagaatcatttgccaaaaacatacttttatttttaaagtaataaagagctttactgtacatccatgtagcagatttttcttctttataaagttcaaataatttatttattgaagttctatcatttaatctaattaatacatttaataatttgtatcttattccctgctcatcactaggattaatttctattaaatattctaatacttttttggactcctttagattattaatactttctaactttctagcaagggattcaagtgctatcatataggctctggtagataaacctttccaaaatccaagttctttatcttctttagtaatcatacttttacctatatttacagcttcctccatatatctaattgattcaatatcactattcgcatcttgtgatagcttaatatatcttttatatagtatttttttcttttctaaatctaaatctacagactttgatttggaattggtctcttttacccaaaattctacattagaaatagctatagtatcttgatttaaaaagtcaatactacaaacatcttttattaaagacgatttattatttatagtatttaaagaaacacctatttgttttgaaaactctttttttgttatatgtagtggatgcttcttattgtataaaagattttgttctaaaactatatttagtatagctgaagaccatatatcagctctagaagaatgaattatctctttattattatctaaaaggttttgcaaaattttaaagcttatatctttgtattcttgatttaaattggagttgcaaaatctatttatcttgtccttaatttcttctatcttgcctgtcatgactcctcctccatattttacatatataaaactagtgctacaaactcaagatcttcttctcctatattttctatagaatgtttttcgccatcagctgtatacactacatcaccctcatttacttctacaaattccccattatcaaatactttaccttttccctttagtatataatatacttcaaaatctgttgtatggtcatgcacaccaattgaacttcctactggtaaagctactcttttaaatagtcttccttttcctttaagctcttcattttgtattatgttttcaagcttaacctttcctataccaccatttaaattttcttttacttctacttgtaattcagatttctttcttatcatagctcatcccacctgccaaacaatcaatctaactactaaattggcatatcctttccataaatatgtttgtattttaatataataataacatatattatcataaaaaaatattactgaatacacaaaaatgatactatttttacatatatttcgacttaattaaattatcttacaagttgacgtctatatgaaaaaaacatatactcatatagtatggtaaaattttgttaaactatttatctggaggttctcgacatatgtcagttttaaaaacgcaagaaaaacttaaacaacctagagatttatatttctgctgttcaatatttacctttgtaggacttgcatactatggtatgaaattggtattattattgtttttagctgaacaagtctccaaaggtggtttagggttaacaccagcagaatccgcatcaatgcttgcatcttttttagcatggacttatttctctccagttattggtggatgggtcagtgatagatttttaggtcccaaaaactgtattatacttggaatgctaatggtttcaattggttattttctaggatacatagcaaatagtaagatggatataaacatcatgatatttttatctggattaggaataggtttttataaaggaaacttacatactatggttggaaacttatataccaatgatgacccaagaaaagatggagctttctctattacgtatatggctactaatctaggtactttatttggccctttaatatgcggtttagttgctaatgaatggtttgctatgaaaagcggattatctataagtatgtatggatatagatatgtatttttattttcatcaattacggttctaataggtttattcttctttatatttggaaacagaaagttttataaacctttgaataatgaccctagtaacgggagagagtctataagaaaatcactagaatataagaaaatgctcgcttcaagacctttaactttgattgagaaaaaaagaataatagtaatattggtgttagcttttttcacagtatttttttggatagcatataaccaagcctctatgtctattgcactctatacaaaggaacacataaatcttactgttggcaattttcaaattcctacttcatggatagattcatacaatggtctcctttgtgttattcttggacctatctctgctttagtatgggtaaaattatctcaaactaaaaaaggcgatttaagtgtgccaaaaaaaatgagcttaggttttatactattagctatagcatttttgtttatgatagtagcagttatacaaacaggaacagaccctaattcaattcacaaagcaagtgtattttgggtagttggatttttaacattccaaagtataggagaaatttgcttttctccagtcgggtatggtatggtaaataaactttcgcctgaaaagtatatttcattcctaatgggtgtttggtttttaggcaaatttgcagcaaataaattatctggctatacgcaagctattatagaccaacttggtatgttacaagtcttcatagtgataccatcatttttattgatatttggaattatactacttataatgaataaaaaattagtagaattatcaaattaaaaattttttaaagttaataaaatatacaataaaaaatcgaggcattataatacctcgatttttattgtatctagtacaaactatatagctctagtgtaaacttttaaccattctctttcttcatcagttaagaaaggtgatattttatcataaactaacttatgataccagtttaaataatctttttcatccttattcattaattctggtactataccatctaagtcaataggagctaacgtaacaacttcaaattccataaattgaccatagaaattcttttcagcttttctaactacaatttcattctctgttcttataccatgagaaccttctatatatatacctggttcattagtagttaccattccttcttcaagaactgcactatcaaatctttcaggtactactctccatctaaatccatttggagcttcgtgaacatttagcacaaatcctataccatgtccagttccacattgataatcaattcccatattccacatgcaacttctagatagtatgtctaagttatatcctctacaaccatgcaagaacttagccttagaaagatttatcattcctcttgctacagaagtaaagtgtagttttaattcatcacttataggtcctaaaactgtagtcctagttatatcagtagttccatcataatattgtccacctgaatctactaaaaataatccttctgcctctaatttataatttgactctggagttgcactatagtgcatcattgcagcatgctctttatatgcagcaattgtattgaaacttggctcaaagaaaccttcttgctctcttcttaagtcctctaatttttgagtagcacttatttcagtgatttccatcttacctacatttttctttaaccagtacataaatttagtgaaagccacaccatcttttacatgtgaatttcttatattttctaattctacctcatttttttgagctttaaaaaacattactggattgaactcatcaactttctcaacttcacaaggtatattattgtaaattgtataactaagcttagttccatctaataaaactttttcagttttgtctatattttttacaaattcatacacatcattatatggctttatttgaacattttccttagctagttcatctaatatttcttcatttaacttactttcatcaacaaataaataaacttcttttaaagttattactgcataagaaagtacaactggattatatttaacatctccacctcttatattgaataaccatgctatatcatcaagagtagttattacatgagtagaagtacctttttcactcattttttctcttaatctagctaattttgagctaaaactttctccacaatatttaacatctaataaaaatgctttactatctgataaagcaggtctatctggccatataccatctattaaatcatactgatattctatctttataccttttttagataatttttcagctaatgtagctccttctctagcagatataactctaccatcaaatcctaaagttcctccttcaggaatatttttatataaatattcatctgtagttgggcaaccttcttgtcccattttgaataattttattgtacttccttctaattgagattctgcctgtataaaatatcttccatcggtccataacccagcttcgtctttagtcacaataaccgtccctgctgaaccattaaaccctgatataaattctcttgatttgaagtaatctcctacatattcactttggtgattatcagaagatggaatcatataggcatctatatttttttcttccataaattttcttaatccacttaatctatcttttatattcacaacaagacctcctcgaaataatagtttgaataactaaatatataagtatgtaaagtttattacataaatattttttgtataatttatataaatcttatacactctaattatcacaattataattttaattataatatctatttgtgtaaagctttttttcataatcaaagaggaaattacatttaattttatatttaaatgtaacttcctttatttgaagtaattcatctatttacaataattcgtcatgaattatttttcttttgttagtaaatccatagccattaatcttgttaatacatttcttattcccaataatattaaaccaaatattattaaaactgttgctattcctccaaatatctgtaaaaaaccaagtgtggctgtaaaaccagcaatctttcctgataataaacttgcaaaaaaacttgttagataccaggctcccatagataatgtagcatacttagctggagctaatttattgaacattgcaagtcctataggagataagaataattcacctactgttgtaaatatataagtcaatactataaacaatatactagcctttaccattccatctggaccattagctaatgtagcaaataccataactataaacccaacacccattattatcattcctaatcccattttaactggaatagagaaatcacctcttttggtatgagataatttaacccatagggtagctaatactgggcataaagccacacataatatagcatttagtgatgtaagccatgctactggcatttcaaatccaaatagagttctatttacattatcccttacataaatcataaaagaactttgtgtttgatagtatgctgtccagaataagaccacaaataaaaataaaataaccattgctattatcctatttttctccaacttagtaagtggtccatactcaattttttcacctttattacctttagtcacaggatattttccgacttcatttaataattttggtgcaagaagtgtaaatataatcatacctaacatcatgcctataccacaaattaaaaatgccatcttatatccataagatactatatctccacttgctcctcttactgcaaatacattatcagaaagcaatccacatattattggagctataaatgctcctacatttactgccatatagaataaactgtatgctgcatcttttcttgacacatcagttttaggatatatatccccaactatatttgaacaacttgatttaaaaaaaccatttcctaaaataattattgatagacctacccaaaccatggcaatagatgtagatgaagcaaatagtacgaaatctcctattgctattaaaagtgcacctatagaaatacatttttgttgacctaaaactttatctgctaaccagccaccgactaatggtgtaagatatataagacctgtaaataagccaaacatggatgttgcttcttgagtagaaagacctaaaccaccttgagctacacttgctgtaaaaaataataccaataaagctgttaaaccataataactaaatctttcccacaaaattgtcatgcaaataagccaaaaactcttcggatgaccactttttttagatacgctttctgtacttgacataaaaaaacgcccccttttgttttatagttgaatttaatattaatattgctttaaccattttagcacatacttataatatcatcttttctatgtttactcaatagattatcgcctgtattttcatttttttattattatttttaaaattatgaaaaatattatttttttagtatcttcagtagaaaatcttaatatatatatatttaaataacaacttaaatattcaattcttttttgtttattttttcatttttgtaaattttcattaaaaaaattcaaattaaaaatatttctttttaatatttttttgcatgttatttatttatcacttcatatatataaatagattttattacaaaataataaaagctactttagactctctatattgagagtaaaaatagcttttatccatacagttaatttttcttttttttaataaattgactttatctattctttagctttcatttgatatttatctgtaattttaacattatatttttcttttaaattttgtataagtaggttttgtttttctgatgttaaactgcttactaaatctgattttacctcttcaaatggttgatatttttcatcagttttcttaattatatgatatccataatcactttctacaagtttgttagatacctctcccttcttcaatgcaaaggctgctttttcaaaagattccaccatctgacctttaccaaagaaacctaaatctccacctgattctgcactactatcttcagaatattttttagctagagtagcaaaatcttccccagcttgggcttttttaagtatttcttcagcttctttcttaagttcagcttttttgctactactaacttgcttacctttatcatcaacagtttttattaaaatatgtgaagctctaacttgtaaataattgctcttgtttttattgtaatagttctctgcttctttatcagtaacttttgatttttcatttaaatattttgatgctactagctcttttttcatatcatcttttatatatttttcagtcaaatcaaactgttttaaaaactcttctttagtcattcccattgctgattctatactactcattaaattattatactgagcatctagttggtcattagttatacttattttctcttttgctgcttcagaggataatatatcagatgtaatcatagtttcaatcatatttgattcatatgaacgtatttcgtcatcagtcatagtagtttttgcatttaaataaaataatggctccattctctttcttaacatttcacctgttatttttttatccccaatagtagctactacctcactgctattatagtgttttgaagtagcaggcaattttcttccagcttctttaccaaaaacatagcctccacctaaacatatagctcctactgcaacaattgctacaatagctttaagtgttttgttgtttagctttatttccctttttttaactttgttatcagtatttttttcatctgacacatcatcttttttagaatttacattatctgaatttttaggttcatctaatgtattttcttttggatttttttcttcagacattaataccctccttaattttaattgtgcaatacttcacctttattattttacattaaaataatattaaatgtgtgaatcagaaatgaaactcttatgaatttaaaatgaaattaaatacttctcaaactataccttataaagtttcttcctacttttgtatctccatattttaacatttgtataacttcattcttttccttttgcaaataaatggcacattcttctaaagacttaaatatttctaaaatgtcaccttttttatttactaattcaacttttttctttccaccccttttgattatagacttatattttttaaaatattcatcatattcttcatcaatacattcaaatctataattcatttttaatgcttcaattttatcatttgtcaaaatttcatttcttttttcattagaaagccttatactaaatattttattgtttagaatattaaatatctcagatggagatttgctattatcgagatagctccattcacctttgcagtattcatctatatttaatacttcacttaaataatttattgcatctccaaagtaatccatatatccatattttaaattttctcttatgtatcctaatggaactttgagttttttactacactgtatatgagtgtcaaaaacccactcttctttagtatacaagtttatagcttttatactttttcctctttttattttaatttcttttatgtactctaaatcttcttctgtcaaacattcacttacttttttttcttcaataacatttttttctagattataattttcattttggtcaagtccttcaaacttatttaaacctattttttcactttcaacttgaacttcttttttacataattctatgtttttatcattaataattgcttctttatcatctaattttatggtattttcactaattaaccaatcttcttctattattttttcttctatttcattatcatcatttactacttctactttagttaatatttcattatcaatattaactacaactccttcttcatctatcaacttttcttcagataatattttttcgttttttaatattacttcaccttcttcttttactgactcacttttttgtctttttttcacaataccaaaccacttttttaacactcaatgttcctcctaatactttattactattctatactatcatataaaatattactgttcttataaatcacttaattttcatatgtttttgatatgatactcctcatgtttaaagaaaagatattcaagtgaaaaagatgacctatttctagtagcccaacatgacatcaaacttaagatatgcaattactgttcctaaactaatccatacatcaatttaggctagtagatttttactttctacaccactatcaaaaaacttactattatacttaggatacaatataacatttacataaatagactatattatcatttgatttgtatttattgcccataatggtattatatattaattatttacataatccaacaatttctatctatcaccttatatcttatatgtaaaaatacattcaataataattataaataacaaaaatggatttaattaatcatatagaccttgaaactcaacatgattaattaaatccattataattaatataaaaaatttaaaactatatattagatttttttactataataaggaatagttataattgtgcctattaaagcatctaccatatcaatcatagtatcttctaaccccccggcctgtgtagtagtcccaacaaaagtatccattaaaaattcacctatttcccataaactcgctactcccatactaaacataaataaaaatataactaaaaacactttactcattttacttatctctctttgtgtataaaagtatttaattatagaaaaagccacaatacaagatattatacctgaccataaatgcaaaaaatcatcataataatttatatcataaaaattaaaacaagtacctaacaatgatgaaaacattataaataaagcaagcattatatataattctttactcaataatctttcagtttgcttatttataaaactcaaaatgaaagtaccaactaaactaattgctactagacctagacttccatattctttgtttgctacaaaaaatacggcagataaaatataaactatatacaatagtatagttattggctttaaaagtttattcatatacactttaccttcctaaaaataattttataataacttaggattaacatcattatcaccatgtccataaagttttaatggcttaagagctggtccttcaagtatatttcccttatagtcaaatctagaaccatgacatggacagtcccatgttttttcttcactgttaaaattaagttcacatcctaaatgagtacatgtcgtgtctacaatataaaaatctccattatcatccttatatacaccatatctttttccatcaatattaacaatctttccttctccattatttttaggcatatctccactacctatttttaattttccacttacataatttattgctacgtttgcattttcctttataaaatcttttgaaaagtagctacctaatctggatggattaaaagtatctttataatcagaattattatttattatcaaatcttttattattattccagcagcagttccattagtaattccccatttagagaatcctgtagctacataaatattgtcttctcttttgttgatataaccaatataaggaacattgtcaaaactcatattatcttgagcagaccatttccccttaaaatcttttaccttaaagacttctttaccataatgctctaaatcatcaaatatttctttctcagttcctccctggccaactttatggtctcctcctccaaaaatcagtaaattttcacttccattattatattgtctaaaagttattgatgggtcatctatacttataaacataccatctgctaatttattttccaaaactgcaaccattaaataagcacgctctgcatattcttttgcaaaataaaaattcaatccatcataccatggactatgagatgaaattataacattctcagcttctattatattatcttctcttgttttaaccctacatatttttcctttttcaagatctactactggtgtattttcatatatttttagccctaaatttactgctgcttttgccaatccatcaatatacttctttgggttaaattgaccttgattagtaaaactaatagccccctttatatctaatggaatattttctatagtttcatgatactcacaatttattcctatttttttacatgtacgatattcatctttaatattctttatagtatcctctttttctgtaaatacaaaagaagtttcccttttaaaatcacattttatattgttttcttctattatttgttcaactaaatttaaagcttcattatttgcattataatatgattttgctttatctaatccatattttttctctatcttagagtaaaatatatcatgctgacaagttaccttaccagtattccttccagaagttccatatcctattttatcagcctcaacaagcactacttttttaccttcttttgctaataaatatgcagttgtcaatccagttattccaccacctactataagacaatctgtttttatattttcacctaatttgttatattcttttggacttgagtttaaaaaccaatatgattcattcatttaaaatactcctttacatattaaatagtaatagttttcccatcatggagtttatttattataaatagtataaaaaataagcttaataaaaagctaaatgaaaaatcacttagttttcttgttttatacaccagactaaacttatatatatttataatttctatattattttcttaatcaatagtatttatgctaagtaaaaatgaggatattctagatttcaatacataagattatattgtgctaacaattataaattgttagccaccaacttttttattgatttagttcgtttaatatttttctgatatgtaatataacaatctctctataaaaatatttacttaaaaatttattttatataaattaattgtaattcttacttatattcttttgtaaatagaaaaggagtataaaataatagtataaatatcaatctttgtataatactatggtaattaataattatttcagaatcattgaaaattaatcctaagctattaattagaacatgcattatagagcaaaaccatatgttcttagttttcatataaacataacctaaaaatatagaaagtccaataccatatatcaaatgggctatagctccaattattggagtttgaggactatatagtgtaaattgtaaaggtaagtgccataaactccaacaagtgcctaccattacaatacctatttttttgccaaatctatcaaataaaatactttgtaaaaaagatctccaaccatactcttcacataaaaaaggataaatatatactaatgatattataggaagaagaatataattcaagaaattcttataatcaaattgattatcacttattattaatccaaaaataatttgagaaaataaaaagtaaaaaactagcaaaatacctatcttaaaatttttaaaaatatataaacttgttattttataagaataaataataacacataaactacttattaaaattaacataaaatacattaattgaaattgattaatacttattaactttaatgattcaataataaatataaaaaagtaaataataaaaaataatattactgatgaatagaaattatatttatcattatttcttccttctgtgtaaaattttgcaatagaaactgaagataatggcaatatcatcataaattgagctaaaatttctgaatctattaaatgattaaaacatattgctaataaacctagtgaataagataaaccataagttatagaaaaaaatattataacttgtagtttttttctttttatttcatcactgacatatgttggctttaaaaagtttacccattttgattgtaaattcaacaaacataacctccctttttataaaaaataattgtaaaaatcataaaatttttctacttatactcatatcattatatttctatatatttataaagtccttattacttacacgactgctgactaaactcttataattctttttttgaatatgtatttacagaagaaatatccaatttcgttagaaatttattcttctgtttaaaatttatataaaaatcatttttatgcaatcagtttactattatttttttaatattacaatatatttttatatacaaaaaaatacaacaaatattattttctagttcgagtgaatattaaaataatatataattttatttatattctaacttaaaaacaatttaaatacaaataaagcaaaacacacttattttacttatataaaaataaaagactgtcaagataacaattacaaatcgttatataacagcctcataaaatccttattttaataaaatccttattttaataaaatccttattttaaaataattcagcaatatattaatttttataaaacatcatattttaagttcttgaatatcctttaattgctatacttcttgatttaatggttttttaagtaatgctaaaagcatcattccaaccaaagcacctacagctatagctaatatatatgcaaatggatgggtaaccactggtataacaaatactcctccatgaggtgcacgaagagctgcgttgaacaacatactaagtgctcctgccactgctgaacctccaacacaagctggtataacatgaagtgggtctccagctgcaaaaggtatagctccttcagtaacaaatgataatcccattacataattaactttaccagaatctctttcctctttagtaaatctattcttaaaaaatgtagttgcaagagctatagcaagtggcggaaccataccaccagccattactgctgccattatttcaaactgccctgattcaagtgatgcaactccaaatacatatgctgctttatttacaggtccacccatatccacagccatcattccacctaatactaatcctaaaactatttttgaagttccgcctaaaccatttaaaaatccaaccattgcattattaattgctgtaactggaggtattactaaaaatgtcattataattcccatcaaaagtgttccaagtaaagggtataacaatactggttttattccttccaatgaagctggtagtacactaaatattttcttaagcccttctactaaataacctgctataaaacctgcaagtagtgcacctaaaaatcctgaaccaccatcacctgctagagcacctcctacaaatcctacaacaaacgctggtctatcagatatagagtatgctatatatccagcaagtacaggtaacataaatccaaaagctttatctcctatccctttaaaaaacgctgctatcggtgtatttgaaccaaagtttgaagggttaatagtataatcatcaagtaaaaaggctatcgctataagtatccctccaccaataacaaatggtaacatattagatacaccattcattaagtgtttgtatacttttctaaatccactttcactttcttcatttgattcgttgtgacttccatctcctccatggtaaattggagcatctccatttacagccttgtctataagttcttccgctttgtgtataccatcagccaccttagtttttatgacttttttgccattaaatctagccatctcaacatttttatctgctgccactattatacatgttgcattttctatttcatcttttgtaagcttatttttaacacctgctgaaccattagtttctacttttattgatacacctttgttttctgccattttatttaaactttcagctgccataaatgtatgtgctattccagttggacatgctgttactgctaaaaccttaggatacttattagcatcattctctttagtatctattatatttttttcagccactttctcatcttgatattcttcactgaatttttctctttcctttttatctattatttccttaaattctttttcagagcttgaatttataagtttatttctaaagtcttcatccataagtattgtagataatcttgataatacttcaagatgagtattgttagctccgtctggtgcagctatcataaaaaatagatttgataaacttccgtcaaacgattcataatctataccttcttttgacactgctgctgctatacaagctttagtaactgaagaatttttagcatgaggtatagctacaccttctccaattcctgttgtactcatttcttcacgagccaaaattgcttttttgtagttttctttatcatttaaatttccactatttgcgaccaaatctactaattcttctattgcttctgatttggtttttgaatttaaatttaacttaattgacttttcatctaataaatctataattttcataaatattaattacctttctatatattttttaatattttaaaactgctttacagatatctcatttaccaatttatcaatgtattctcttttggctaagtcatatgaaaaagcagttgcactacctgaagctgctcccaatttaagagcataatcatatttcccagtattcaaatacccagatataaatcctgctaccattgaatcacctgctcctacagaattttttacttttcctttagggacatcacttataagcacttcatcttcctctgtaatcaacaatgctccatcttttcccattgataccaagacatttatagctcccatttcctttaatcttttagcatattttaccatgtcttcaattgaatttaatttaacaccaaatagttcttctaattcgtcgttattaggcttaattagaaaaggtttgtattttaaaacattaagaagaagatttttagttgcatctactacaacttttatattctttttttctaatctagccattatattttcgtatagtttttcatctaaagtagatggtatacttcctgccaatattaaaatatcatcttgatttagcttatcaagttttttatataaagtatcaatgtcttcatcatctatatttggaccttgtccattaatctcagtttcctttaacgcctttatttttacatttattcttgaaaaaccactttttatctttataaaatctgtcttcaattctttttcttccaatgttcttattatatattctccagtaaaaccacttataaaacctaaagatgtattatcatttccaagttccttaagtatgcgagatacatttataccttttcctcctggataaacgtattcttcttttacacgatttgtacttcctgtctttagctcatctagcttaactatataatctattgatggatttaatgtcactgtataaatcatattgccacctcttttttatttatttgctttatgtttatatcttaactttatattaatatccttgaaagtcaaaaaatttctcttaattaaaagagaaatttatcgtttttatcttatttagttttatattatccaaatttacaggtgtatatacaatactacccatctaattaaataaatttacaaatttttcaaaactactattttcacatatacttataacttttgctatagaatctactcttttatatatttttgaaaatattacttcataatctaatattttatctttatcaagggctaacattattattaaacgaacatctgatatttcccaagaaataggcttctttaatataccaattgctattttattatcaaaaatttttccaatagctccatgtggtatagttaccatattccctatttctgttgttgctattttttctctctcaaagtaagattttttcatatcctcatctatatagcccttttgtacaagtttacttgccataaaatctataacttcttctttccttttaaacaccaaatcagtaaaaaataattcactatcaaacaggctttttatatctaaatctaggtatatatttcctgtttctatatatttttcaattaatctaatttctttctcacttaaaattggagatatatttattactggcacatctcctacttcaataggaacagtagatattacaaaatcaacatctataacttttatatattcaactaagtatgaaggaataatctttagtatttctaatttttccttaaatatattctctaatttagcttttattaacattgatgtgcctatgcctgaagtacaaactattatagttttgaaaaccttatctttattattataagatgctctttcaactgctcctcctatatgtagagctatgtttgcaacttcatcttcattaatttctatcttcaaatctttttctattgtctttttagctatattagctagttcaaaagcaaatggatattttatttttatatcttgagccattataggtgattgatttatacctaactttatttttttacataaactactaatatgcttatataaaaactcttcaaataccttatcattacttatatctattgatgtagctaattttaaatttttacaaaatgtttttattgaatttattataatttctttgttttgttcattttctaaaattgagcttcttttgctcctataattttctatataattctctataaattctttttcattatacttatgtctgcttaacataactaatatattatttaacacactcttaaattctatatcagttaatactaatccattttcatttaatatgtctaataataatttttttattaatagttttctttcctttatatcgtcatttaaaaaatcatttaaactcaattgattatctctcttattgcttaagtcaactatacaatttaatatcttatcttcactttccaaaacacatataccttgtttatgcttagatttaactgatattgaatacttttccaatattctttttacttcttttaaatcattttttactgttgaaacacttacatacatagaatcggctaaatcttcaagttttatagtatttttttcttcattacttaaggttaatatttttctgattatatattctactctatctacatcatcatagagattgctatttagatttacctcatcaaaacttccttctagtttataaccaactcctcttattgacaaaattttaccatttctaagttgtttattaatatcctttatttcattttgtatagtttttgaagaacatcctatctcttgacttaaggcaataccactaattgtatcttttgaatttaacaatatttttattatatttatctgtcttgctgttatatttaaactcataaactcaccttttactctagatattgatttcttaattttcttatttcttctttatttaaattaaattctccatataaatatgcttctacactaatgtattcttcatcaattcttctaaatgcagttttcatatactcttcatttacaccaaatatatattttaaattttcttttggaatgtccttaaatttaggcttatattctataaatctttctatctctttatctgcaaaatcattactttttagataatctttcattatattctctctcgatacccctaaaatcataagaattatagcactccccacaccagttctatccttaccagctgtacaatgatttaatattggtaaattagaatagtctcttataagttctactaattttttatatgacggattatttataggcaaattatagtaactattatttaacatattaaatgcaccatctttttcaaacaatccatcaatcatatcttcaatagaaccaaaacttcctcctgattcttctagctctctcattgctggtattcttatattttttatatttgatattattgttgatggatgtttacgagcttcttcatcacttctataatcaaatatatatttaatatttaactcttttaaaatctttatatcattttcacttagatttgataattttgcagacctataaaataatcccttctttacagttctgccatcctcagttttgttcccacctaaatctctaaaatttttcatcttagcacctcttaaaaaccatatattatactttttttaatatctataaattaattttatcacaattttaagttctttatttaaaatattttttagtatttggttattaattgtaaaatataaaagtatctctttatacaaaattaacctaaattttacataatttatttactttacataagctttatagtttataatcaatatacagtagtatattttctgtaaaaaagaccatatttagaataatatcaaatacattggaggttttatattatggatattcaaaagcaaaagaattttataattaaatttacatatgtagttttaataacaagtattgtatatattgtattaaaattcttattgccattattaatgccttttgtaatcagttttatcattgcatccatcttaagacctattataagacttattacaaataatacaaatttaaatcgtacacttatttctatagtaatacttttaattttttatgggttgtgtatatttttattagttagctttggtgtgaagatatttgcaagtgtaagtgatgtattttttagacttcctgaaatatataaatcaagtatacaaccaacgctaaatactttattttcaaagatagatgctagtacacctaatgttaacctatcattaatacttggttgggataatataagtcaatctatgatgtctttagtagcttctatttcaacaaatgcactcaatgctattgctagtattgcaagtaaaacacctgcatttatgttaaaacttattattactttaattgcttcttttttctttacttttgactatcaaaaaatagtaaactttatcttaaaacaatttccagaaaaaagtcaatttatgataataaatataaaaaatagcagtattaatgctcttttaaaactactaaaagcctatgcaatactactatcagtgacattcttagaactacttattggacttactatcctaaaggttgaaaatgcatttactatatctgtcatcatagcacttgttgatattttgccagtcttgggtacaggaagtattttgacaccttggatgattatctcactcattaatggaaatattaatttagcaataggacttttaatactatacataattataaccgttgttagacaaatattagaaccaaaggtagtaggacaccaaattggcctatatcctttaataacattaatgtgtatgtttattggagctcaactatttggaatagctggattatttggattccctatcgcagctacaatcataaaaaacttacatgataatgggattattactgcatttaaatagtttaaccttgacatttttatttaaattaaaaagggctttctcaaacagggataagctctttttaattgttaaaatgatgaaaatacatttgattttatacaaaaagagtgcctcataaactaaaaagtctattctaagacactccctttttttctactctgcacaaataatatcaatcatttctttatattcattttcattatttaaaacatctatatttttaaatttttcttttattttttcttcaatctctaatgaataatctattgtatatggaataaatttctctacttcttttatatatcctacagaaaaaaattcagcattataaactacagaaaataaaattaacattaagcaatcattctttatcatagttattacagatttatttttattattaattttaaaactatctattaactcaatagtaaaatttattagtttatttacaactttatctaaagtaccctcttttgacatctctgtaataatagttttatggttgtattttaaatcttcttttatatcttgtaaatcatcagatatttgtaataaaaatccatatcctatacaaaactctatttcttcctttgtcataaatccacttattaaatatccatctactaaaacggatgaacctcctttttcaatagaaatggataataaatcttctttacacaaatgattttccttaccatgttgttttaaactatttacttgacttttaaatattaataataacgattcataaacttgtgtaaacttttctctagggtatacactttcaatataatctatcatttgagatactttactttcatgataatccttagatttaatatgttctcccaggagccttttttctaaccagttattaaataaaatcttatcatttttatctatatttgtattgtctaaataattatcagtatatggatataacatactatatgcaaagttagcttttgaataatatatttctttaccaaataataattgtaatgcatttgaaatccatacattcctcatagcttgcataatatcacctataggtaaatcatcatcaaattttctagcatctctaataaactgttttgttatatctaaaaatttttttctatcctctacatccattttttctaacttaaaaatattttctttttccaatgtcttttgtaagaaaacctcgcccttttttacccacatttttctcaatacagcatcacttggatacctctctaaatgaactgatattgtatttataaatttatctaattctttttccctctttttttgtgaatctttactatacgtttctatatcctcaaataattcaacactcgaattattccatgtattttcacactctttacaatagtatttaaatatgccacttaaatccatttaacagccctactttcatgcctaaactatacactatattatatcagtacatataactaatatacagttaaagttataattgtgtataataataactttaaaattatttgttttttagcttagctaatgcttctgcaaatggattattaaatgtctcttgatttttattttgattttttaaatattgattaacatctttttttgatgccttctgtttttcttcttgctttctcttgttgaaagaagacaacttttctctgtatccgcaactacaagtgaagattctcccctcaccttctccacgaagttctaattttttatgacagttaggacatcttgaattggttacttgtgatatagtttttctagtattacactctctatcttcacaaatcaacatcttaccttttttaccatttacctctaacataaatttaccacattctggacatctatttttagttaagttatcatgtttaaatttattatcactattttttacttctagtacaatatcttttgaataatctttcatgtcatttatgaatgtatttttactaagttttccctttgaaatatccaataatttcttttcccatgaagctgtaagttctggtgtctttaagtctactggaactaaatctaataattgtcttccttttgatgttatatatatctctttatttttcttttccattaaaaatgaattgaataatttttctattatatctgctcttgtagcaactgtccctagaccattcttttccatagcagtcaataatgttccctcatttaagtatggtggtggatttgtttttcctgaagttatctttaatcccttgaccttaagtacatctttttctaaaacatttggtatactttcatactcatcttcatcttcaatatctttataactttctttccaacctaaatttattactttgtttcccttagccttaaatatttctccttctacagttgcacttatagttgtctgctcatattcaaaaggaggagatagtactgctaaaaatctttttactacaagattatatatttttcgctctttgtcactaaaatcactcatgaataccttctgttctgttggtattattgcatggtggtctgttacctttgaattgtcaacaaacgatttattagctataatattgctttttaataatttattacaaatctttgaataatcactaatatttacagcttttattctatcttttaatgttccaacaatatctgatgttaaatatctagaatcagttctaggataagtaagtactttatgatgttcatacagtttttgcattatagataaagtttcttttgctgaaaatccaaacattttatttgcatctctttgtaattctgttaaatcatagagtgcaggtgaatattttttcttatatgacttgtttacttcagatatttttatgtctacaccttttactttttttaatatggattctatcttttctttactaaaagttgaagaattattgtttttatcattccaaataaattttatatctgaatttccctttgtagcaattaattctaatccataatactctttaggtttgaaatttcttatttcttcttctcttttaagcaacattgcaagagtaggagtttgtactcttccacaagaaagctgtgcattgtactttgttgtcaaagctctggttgcatttattccaataatccaatcagcttctgctcgtgctattgctgagtaatacaaattttcatattcttttccacttcttaattttgcaaatccgtcttttattgctttgtctgtacttgaagaaatccaaagacgttttataggtttttttacctgtgatttttctattatccaccttgctacaagttctccttcacgacctgcatctgttgctataactatttcatctatatcatttctattcatttgcgatttaactgtattaaactgctttccactcttttttattacaacagtcttaaggtgcttgggaagtattggcaggtcttctaagctccatgatttatatctttctccataactttcggggtcagcaagtgtaaccaaatgacctagtgcccaagttatcacatactttggcccctctatataaccatttttttcattttttgaccctaaaacttttgctatatctcttccaacagaaggtttttctgctagcactaatatttttcccatctaaaaatacatcctttctctatacataatctcatattacgcttaaaatctaactaaatagaacttttcttaatatcgtaactataatattaccataatttaatcatatctaattaattatttaagattttattatttttttatttaaaacttattttacacttcatttgtatgtgtattacaaaattcatttttacgtatattactcatctttctaagtttataattcgtaaataggcttacatttttatattttttctttgttttttaattttttagttgacaaaacataaaaacttatattaatattattaatacaataagctatgacaaatcaatatccggttaagattttatagaagagttgctatatagcacaccgaaggagtaacactctcaggtacttttaaaagtaggactgtaaaatttacggaactctggagagacccattatgggcgccgaaggggcaaggcttttatgctcaatctctcaggcaaaaggacagggattatctaccaaaaacagtatttactaatacttttattttggttgctaattagtgtacatccagagctgaatcttttttagatttagctttttttattacactagaaattattaataaattatacttatttcctgtcaattacttcattaaaaattctattgattatgtaaagcaaaaaaaatgagggagtgtttttatgaatctaattgatattttaaacaaagttgatgcttttatttggggaccacccctactggtactattagttggtactggtatactacttactgttaagcttggagttgttcaaataactaaactgccaagagctcttaagttaatattctctgctgaaaacaaaggtagtggtgatgtttcaagttttgcagccttatgtactgctctagctgctacagttggtactggtaatattgttggtgttgctacagctatcaaagctggtggacctggtgcacttttttggatgtggatagcagcattctttggaatggctactaagtattcagaaggtgttcttgcaataaaatacagaactaaagataaaaatggtcaagtgtctggtgggccaatgtattacatagtaaatggtatgggagaaaaatggagacctcttgcaatatttttcgctataagtggtatactagttgcacttttaggaatcggtacttttactcaagtaaattcaataacagatgcaataaataatagtttcgggatagaccctagaattacaggggttgtattagcagtatttgtagctttggttgtatttggaggacttagaagtatatctaatgtagctactaaaatagtaccttttatggcagttatatatgttgtaatctgtggaatcattttaatatctttttggaataaaatccctgaaacttttatgttaataattaaaagtgcatttacacctactgctgctactggtggttttttaggagcaactatgtcactggcaattagaaatggtattgctcgtggtgtattttcaaatgagtctggtctaggtagtgctccaatagctgcagctgctgctaaaactgaatggccagcggaacaaggtcttatatctatgacaggtacttttatagatactattataatctgtactcttactggattctctcttgttatttcaggagtgtggtgttcagacctaaatggagctgttatgacacaagcagcttttaacggagcaattcctacatttggaccaatattacttacagttagtttaacattatttgcatttactacaattttgggatggagttattatggagaaagatgttttgaatttctgtttggtgtaaaaggcatgaatgggtatagaactgtatttgtggctatggtgttattaggtgctttcttaaagttagaagttgtttggataattgctgatattgtaaatgggcttatggcaatacctaaccttatagctttacttgcattatcacctataatagtatctgaaactaaaaaatattttgaacatataaattctccagaaaatcagataaagaaaaatgcataaataaaaagtatagaatcccaagtcaattttatatggctttcggattctatatttttttgaaaaaatgtaataaatatatttacaaaatacggtgattaatataataaaacatagtaattgatataaataatacatatattttaattaaccacttcaatgaaaattatttagattaaaactttatttcttctgggtatttccaagattcaaactcatcaacatctactacttcaagttctttaaattgatttaatactaaagacctatagtatatttctgctacctcttcaacatatcttgattttaataatgcttcgtctaaatcattacctacagttgtcaacccatgtctttctaataagcatgcatctgtatctatcagtaattttgaaacgctcttagctaattttaaagttcctggtctttcgtatggagcaatatctacataaccgccataattaactgattcatatacaattggtataattggtttctttgctactgaaaatgctgttgcatataaagaatgagtatgtgatatagcatttatattttcccttattttatatatttcaatatgcatcaatacctcactacttggcttaatacctttctcaacttctattacatttccattcaaatccaatacacaaatatgttcaacgtttaattcttctcttcctatacctgatggggttataagtatatatccagtatccttatctctaatactaaaattaccagtcttttctttacataaaccataatgctctgctttaattgctatttccacaactttaccttttaaagagtctagcataattcacctccagataatcatttttgaccatagtatgcattttttccatgttttcttgaaaaatgcttattcataagaaccttatccataatattatcaggactcattaactctgtataataagccatctttgcgacttcttctaaaactactgcattgtgtacagcctcatttgcatcttttccccatgtaaaaggtccgtggtcatttacaattattcctggacaatgaattggatttcttcccataaattcttcaatgattacatttccagtttccttttcgtattcattgcaaatttcttctctagtcatttttctggtacatggtatgcttccataaaaataatctgcatgagtagtaccacaagatggtatagattttcctatttgagcccaaattgttgcccaacttgaatgtgtatgtactattccccccaattcttcaaactctttatataaaactagatgagtcggagtatctgaggagggtcttagtttgccatcaactacatttccctctaaatcaactacaaccatatcttctacagtcatattactatactctacaccacttggttttatcaccactaatcctttttctctatctatcccacttacatttccccaagtataagtaattagctttttcttaggtaattctaagtttgcttttaatacttcttcttttaaaatttctagcacttttcttcctcctatattttatttaatgtcatagttataaaatttaattgtttttagaattttttattaaatttttatatttctactaggattttattgaaattaatttctctcttgctcattttacttaaaaagtcacccacttcattaagacctattttatgtgaaatcatgggtttaaaaataatgtcaccttttcccataaaatccaatgttgcagtccatgctcttccaggataagggcttgcatatgaattccaagaacctttcaaggtaagttctccacgtaatatacactcagtagcgtctgcactaagtggtaattctgtgtgtgatatacctacaaacactatatttcctctcttttttgctacaaatagagattgttcttgtgtaaatcggctaccagcagtctctattacaacatcagcaccaccatttgttattttttttatttctttgattacatttacttcttttgagttaagtatatagtttgctcctagaagtttagaaagttctaatttttcatcaaaaatatcaactgctataatcttagatgcaccaaacacctttgcccattgtataacaaactgacctattggaccacatcctaacacaactacactatctcctactctaatattagactttgaaatcccatgataagctatagttgctggttcaattccggcagcagtttcataatccaatgtatctggtagttttaaaatatgttcttctggaactcttacatattctgcaaacgctccatttactcttgttccaattatattgtaatcatcacacaagccaaaattaccttcattacaataatcacattttccacaaggtactaatggtgcaacagctactctatctcctacattaatatgctttactttttctccaattttaacaacttcaccagaaaattcatgtcctaaaatcaatggatattttgtatttccactcaaaccacttaccatagacctaggcaaatctgaaccacatatcccaacatattttacatttacaagcacttgcgtatctgttatttctggtatatctaccatttcatacctgacatcacctacattatacaatactgatgctctcattttatctcccatataaatatctcctttcatgctatatacttctatatagcaatatctatgccatacaaaagataaatggtttattcaggcaaatgccttatatacaaagtcttttaccagtagagattacattttataaaattaaaccacattactgtataaatataaaagagtatgttttaaatagcaggttatacagaaaactcaactataaaaatacaatgcattataattacaaatattatcaaataaaaagaagtctatatttcatttaaatatttctcaggtattatctgatacttatataaaatcaattataaactcctttaattattcttatttcatttttataaacttaaactgctacaggctcttcttctacatttttaagtgcttgtttttctaaataatcaagaatacttgttttgttctttctaaacaatgcccatagaacaaagtaaattacaactgaaagacctatataaattggatttgcacttagaaatgcaaagaaaactaatcccatcaaaggttttcctagtatattaaagcttgttattaacattgctcctgcaggtatagctacacctatatttgtagccatatctgtaaataatggtgctgtagatgtacaaacatataatcctaatccaaaccaaattatacctgaaactaatacttttggtatattaccattatgtatggcaactaaaccttgaaccatatatggaattgccaacaaatccacaactggtaataccttattaccaggaagtaccatagatattacaagcattattggaattaatataagacctgatattaaagttgcaggttcaccatatccaacagcatcatttactgctatgtaccactcacggtttccagctttttgcataatctttctagctgcttctgttataggtgcaaatgcttgagcaaacatacttgctactttagggaaaatcgccatcactgcacttgtagatatacctactttcattatttctccccaagcttccatagtatttattctcgtcatattacctaatatacctataaacatacctaaaaaaagacctaaagtaattggttcacctaaaaaccctaatttcttctctaattcttttggatttaattttattttatttaatcccaatttattgtatatagggtctgaaaatactgcaaacacagaagcctcaacattatgcatagctattattgtacaattaggatatctatagtaactagaccatctctttgcaactaactctgatattaataaactatataagtttaataaaaccatacatgctatacctaaaggaaaatttcctgttactcctataaccattgctccccataccatataagaatagttattccataaatctgatggttgaaacacgtctgtccattttatcaaaaataaaattgtttgtaataatataccaagacctaaatatatcatacctgcacttgttgaaaatgcaaccaatgatgttgcttgccaaccaacatcaaaaactggtaggtttactcctgtactctcaaccatcctattgataactggtgttattattggtgtaaatgaatttaaaatcagtgtaaaaccttgtaaagcaactcctgcatacacagcagaaagaaacgatttcttagtagttactttaaatatctttgctattatgaatattataattggaactataattgcagaaccaaatgtatcgattatagatttcataaattctaacatctttttccctcctacttataaatatttataagcttaatttaatacttaagtgactatttttataattttttaatttatgacaacatataaaatgttttttccacaaatatttagttaatattagcttattatagtatctaaatcattgatttaaatactataaattcacgtctccaaaacttacttatctatgccttcaataacagtcaaaacttcttcaaagaatgcctcttcccctataccagttaggcaagcaaatgcatttatagttggtattccataatcgcctgtttgaagcggactcgtaaatgttataaagtcaaatcttcctgattgtgctaaatttagtgcttctgttggtctagcttctgttgtagtaatagaaatccccttattacctagtacttcttttaatttacctgctaccatagatgatgtaactgtccctgaaccacaaactgataatacattaaattgtttcataataatttcctcctaatttttcactctaaatttttattttatataagattaaacctattaaaaaaataatacttactttgattgttgaaattttaattttttatttataaaattctcctacattaaatttctataaaatccaataatttagctacttcttcttttgttgatgcgttttttatattttttaataactttatattttgaaaaactgacattaaatcttttaacagttttacttgtgaatctgggttctttactgctaataaaaatacaagttctacatcaagtctatcttttgggtctatcattgaattaaactttacaggatttttcaatatccctacagctacattagactcatttacatgctttgaatctgtatgtggaatagcaacacacatttctccaatatctagacctgttggtaatgtcctttctctttccaagacagcatttatgtatgtttcttttacatattcttttttacacattatacttcctaattcttcaataacactttcataatcattagattctaaacccaatgatattaaatctacattcattactctaactcctctcaatttttttgctatggctacagatgtttaaatttatcaaatataatccttctaaaagcatctttatcaaaacacttattggcattgttcataaattctgcatcttttagtatctcaagaacatttttaacaatctctttatcattagcctgaaaaactggcataaatatgaaatttacattacctacaccccaatcaataggattctttagtttaacaaaaacaaaccttgtactatttacagtagaagaatctccatgaggcacacctatagctcctttagaatatgttggaagcatttcttctctatgtaaaacagaatctaagtaatctttttctacatattctttatttataagaattgaacatacatattctaataaatcctttttaaaatatatatctggttcaaaaatcactaaatcctcatcaagcattctttcatacgatttaactggtctgtcatcttgttgttttgattttgatagatagatatccaaatttttgaaaagttctttattatagggtataaaatttatacctggtatcttagggtttattgtcccaacaatagctaatatattgtttgtctcttttagattttcaattttacaaaataaattttcatccaatgcactcatttgataacatttagtgttatcatacttttcttccaacgttttacttatatacttagcagttccttctccagtaagacataatgttacaattgcatttgatttatctatgtgtttttctaattcatagttatatcccatcctatcttttagcaaagaaaaaaatatttcatcaagttcttcctctcccatagaaacttttctagttgcttctagtgccattaggaggtctactctatcaatagttttagtgcttatattggttctcttatttactatttgacctatgtttgtaagtgaaccaatatccaccaaaaacaatatacctttcccttggtctattatttttgacagttctactgccttattgtatatatttattggtttttcatctaaaggcatatctatagccacaggaaactttacacctaaaagttctttaactacatttacagtctctgtagctatacgtccatgagaaattattattaaccctactttatcttttttcacttcattttttagagcagactttatgtagagtgttataaatccaatttcatcatctggaatcttaatactaattgattcctcaatttttattgcaaaacttttactaatttcatattcttttgaaaagtcaatctttattttttctaaatttacatttattatcttttgatttagcttaattctttttatagcttcttctaagtgtattgctagatatttgaacatatttttatttacttctaaattcatatttttttcaactatatcattcataagttcttttaccagtttaactaaactatcacttacaaaactatttaaatcactcattgaaaaaatttcttcattactatcgagattaaactttaagtcagcaaatctatttaaaataaaagtccataaaatattctctatatctatatcttcaatgtctagggattttaggtcataatatttcttttcaattgttttgtatatgtcctctggtaatatatattcatcacttaaaagacttccttttactgatgattcttctaaattaaatggtataaatatagcatttttcaaatattttcttatctctgtatattcaatctcttgaaaggcagcatctttaaaagaatctttaagctttaaaacttcatttatatctactactactatcgattcactatcttcatctttggaatttataaacttcataaaagctcttgcacaaagaacctgaatcatattttgtaattgtcctatatttccactaaacttttttagtacaagtatttcaatcacatttttatctacaaatatttttgcatttattctattacactcttgttgaaagatattgtatataaggtctattttctcttttagtaatctatcatgtaatggtggcaaagttattagcattggtatccttcttctgaatgttaataataaattagtctctacattttcagtagttgccccaatcaacataatacttacttttctttcagcattagtttcacctaatctcctaaactttcccctatctaagatagaaaatagtatttcttgaccttttggaggcaatctatgtatttcatccaaaaataaaactccttcatcagcttcttctacaagacctggtgtatcatattcagcacctgtaaatgcaccttttttatatccaaataacaaagataataataattgtggattgtcactataatcagcacagttaaatacaacaaaattggagctttcttttactatctttttttgctttgcaaactcatacatatgtctagaaaataaactcttaccaactccactttccccaataatcaacgttggtaatccttttggtggatacaatatagcagatttagcctgctccacagcatttctaagactccctttattacctatcagagtttcaaatgggtcattcgattcttcttcagattcctctactacatccatttctaaactttctttaggtaaaagttcctccacaactcttctcgatatattaaagccttctgtcatcaattcccttgtaatttctgatatagaaatattcttattcttttgtaatattgccgaaattgctgattttaaataaggatatcttctttgccttgaattacttatattaagttcttttctcaaattagttatgttctctctagttgtacttaaaaactttgctatttgaacatctgttaatggatcttttttattttctgtatttatgatgtttacaagtttatctctcaactccatgcttaataactcctttcttgataaatatataagcaactatcatgccatacttactttgatatttttttctacttaaaccctgtaagtaactagatgtcataagtatttatacattttgataagtatttacattttgtatatttagtaatttactaaatgtattagttattcataatcttaaataatttaactctttgtttaaattttaatgcaaaatactttataaatttatgattgaaaaacttgctcaatcatatataatagtacgtatctactcaacaataaaaattataataaactgtgtttttaaccctttctattttaagattttatttttatatgatagtatacatacttatataggtaaggttttagctatataaatagttttaacatgatttaatatggcatattatactattttaacttaaaaattaacttataaatattaaatttatatacagaagggaaaacgatatgaatacatttaaaactgaagttttattaaaatattctgcaaaagacatatttaatatatttacaaaatctgcaagactaaattttcctaattttaatgagaaaaaagcagtaggaacatttgtacaacaaaaaaataataaaagatttaaggttgaaataactaatttcgaaaaaaatagagtatatgagataaaaacaagcaataaaagagaaagtactattactagatatgaattagtacatattgacttagaaaatacaaaacttatttttattgaaagtgagagcaagaggaatatatttggaaaaatcaattcagctcttgtaagagtattgtttggaaaaaggcaaccagaagaatttaataaatttataaaaaaactagaaatggaattggagaataatagtgttaatttatagatataagttagattatatatttaaaatctatctaaaaacatatttctaagtattttatgagtcctactattcgttacaataattaatgaaaaaactattgataaacatgtgacactatgactatataccacattaagagtatcattagcaataataattttatgtattattgcttttagttaaaaaaagagagaaaaattaataatctctaatatcccttaaactttcaataaagaggataatctttatctaataagattatcctcttctaatttagaaaagatattaatttattcactatatagtatttttgtacaaatcaataaaaaatatatgtcatattcttatctctaatagaaaatatattcccctcttccataaaactctcaatatcttttttatctataaatctatactacttagttctcaagcataaaataatataaagattctttatacatgatgatatattatattgactattagacatttgtctaatataatcaagttaaaggtgagtgattatattgaaaaaaataccaaaatccgagttgttagttatgaatttcatatgggataaaggcatagataaaataccagccagagaagtagctaattatatggaaatttctcatggatggacaaaaggtactactggtaaagtactttctagattaagtgataaaggttttttagaatttgaaaaagatggtagaaatactttatacactattaaagttaaacatgaggaatatctaaaatttgaaacaaaggattttttagagcttatacataaaaattctattcatagctttatatcatcattaggttgtggaaatgaaatatcagatgatgacataaaagaacttgaacaatggctaaaaaaaagaaaataggagacgtattttatggaattatttatagaagttattaaatttaatatttacataagtctactaattctttttttcattttatttactaaaaagataagcaaatatacttttaagtttaattattttatatgtcttttaatagtagtcagaatgatgtttatatctaaaataaatttaaatatattaaatatcaataatactactattaatatctataaacataatctcgataattatataccatatgaccagggcattactttagatatatttatgtacatctggatattaggaattatagcaatctctttttactatttaagaacaaattttaaattttataattacatagaaaattttaaaaaagaaattttagaaatagatattactagtatcttagatgaacaagcaaaagaactaagtataaataaaaaacttcagatatataaggttaaaggtatttattcccctgccattataggtttaacacgctgtaaaataataattccagaaaaaaagtacaataataaagagttaagatttatctttaaacatgaattaattcattataaaagaaaagataacttatttaagcttctaattagtataatatgtatcatacattggttcaatccaattttatacttattaaaaaaatattttcatgaattatgtgaattatcttgtgatgaaattgtgattgacaaatgtaccacgagtgaaattaaagagtatgcatatataatattaaatacaataaagtatcaaaaaactttgaagtattcatcattcgtatctcagtttctaaataaaaaaaatattattttaaaaaagaggttaaattctatgtttaatcaagataaaaagaaaattaatttaggtcttaagtttttattaacctttataataatagggtcaatattttctatcaactccaattttaaacaaaatgaagatgtagaatatactattgctaagattaattataataaaaatggagaaacctatggtacacatataatagactcaaatggaaattccattgaaccagaacttatacaaacaataggtagaggtaaaaaagtcggctacgtaaaaaaaagagatttgtacgattgtgataatcaaccaaagacaccagaagaagctgttttatatacaagaaaaagaaattttaatatatttaaaaaaacaatccctctttatgataaagaaggtataaaaattataggaagatttgaaatcaattaaaagacaaaaactgatagaattatttcctatcagtttttatttgtatctttagaatttattgttttagataaagaaaaaatcaaattaataatgtgaggtgaaaacttatgccaattaattcttttgaaaattatcctatgaactggaaaccaaagagaccttcaaaagggcaaatattatataaggcgcttgcagaacaactagaacaagatatcaacaatggatttttattaccaggtactaaattaccaccccaacgtgaattggcagatttcttagatgttaatgtgagtactatctctagagcttttaaaatttgtgaaaaaaaaggtctaataagtggagttacaggaagtggaacttttgtatcttatgatacgcgttcaaatctattcttgatgtccagtaataataaaattacatttattgaaatgggcacaatgaatccagatttcacactagaagaaatgaatactttgtttaaacatataattaaggaaatagattttaaaactatattccaatatggacaaagagatggtgctaaatggcaaaaagaagctattgccaaattaatttataaagctgggcttgaaactacatcagatagcttacttcctgcaagtggtggacaaaatgcaattgttgctattttagctggtttgtttcaacatggagatagaataggtgtagacccattaacttatcctggaataaagacagcagctaaaatgcttgggattcaactaattccaattaaacaagaagataatgagattagtgaagaaggactattatatgcttgtaaaaatgaaaatattaaaggtctatacataataccagattatcaaaatccaactacacatataatgtcacaaaatggacgaaaaatgattgcaaatattgcatctaaatacaatttaattgttattgaggatgctattcatagtttacttaatgaaacacatttaaatccagtggcttcctatctgcccaatcaaacaatttatattacgagtttatcaaaaattattgcacctagtttacggctagcatatatctctacacctaaacagtatcgagaggcattatcaagcgcattatacaacattaatctatctcaatcttattttttaacagaaattgcttatcgcatgattacatcaggtgaagccgataaattaattaatgcacgccgtaaatctgcaagaagaagaaacaagattattaatcaatatttatctggatataatcttttgggaaatgaagaatgtatatttagatggttgattctacctgatggaataatggcagaaaaatttgagatacaagcacttaaagaaggtgtacaggtctatgcttctgaacgttttgctgttggaaaagaaaaaccaatttctgcaataagaatagctgtatgtgctacagaaagcacagaagaacttaaagctggtctgagcgtattaaaaagactattagaagagaaaaaataattgtattgcacacaatattttaattgtgtgtatttttttttgttgttaaaataaaattacaccagatagtaattaacttatagagattaatatgtattattacatcataataacaaatagataaaatttaataaccgtttaagattatttatttgttgtatagtattttatatattaatccaaatttatttttaattataattgcaattatacaattaatctatttttctgttttactaatactttaatacatttaatacaaaaggagtgatttattgtggaaagaactcaacaattaaaagaaagctttattgcttcaattcctatattcttaggttatatacctataggtatagtaggaggaatactattacaaaaatctggtctttcaccttttcaaatagcactaatggtaactttagtatttggaggaagttctcaattcattgcagcttcaatgatttctactggtgcaagtgtaacatctattgttttgactacatttatagttaacttaagacattttctaatgagttctaatttgaacatgtacataaaaaataaaagtccaaaatttatattgccattttgtcatactataacagatgaaacttttgcagttaattatgaaaaatttactgctggaaattggtctgatagaaatgctatttatcttaatttcttctgcttaatttcatcagttttagctaattttattggagcatttttaggagaaagtatatctatagacagttctatttctggcttcatattgacttctatgtttatagctttaatagtttctcaaataaaaaataagatttatattgtagtatttatatcatcaatcattatttctgttattttatatgcattattcaaaagcaatttagtaataatagttgcatcaattttagcatctttaattggtttctttatagaagaatcttactgtaaaaaggaggaatcttatgaataataattatatattttttattataattggaatgtacattgttacatatctaccaagagtgcttcctatgttaattttttcaaaaaaagagatgcctgattttttgaaaaaaatcatgaaatttatacctgtagcaatacttacttccttaactgctaaagatgtattttttaatggagatagtctatatttatctatagctaaccctaaaattatatcttttatgattgtacttcttgttgcatataagtttaaatctattggtatttctattattacaggagtgatatctatatatttatttggaattatcttgtgatatttggataatgttttattgtataagttattttaaaactatgtgtacaattttaatttaagttgttatattattgattttaaataaaaaacagagtgacttaaagttactctgtttttactcttcattctctactgtaaatattctaatatattataataaaagctttcgacagtaaaaaaaatatatatacttaaatactatctcattccatatttgttatttcttcttcatatttttgaaactctaaatttgctttaaataaatctccatctatttctatataaaattttccaccttgtaaagctactaaatctcttgcaatagcaagccctaatccacttccttcagtattccttgattcatcagctcttttaaatctttccataatctcacttgggtcaaaatttaattcataagaagatatatttttcatagttacctttacattttcaccatagtcatatacatcaatatagactctagtttcttctaaggaatattttgctatattagataaaagattttcaaatactctatacattcttcttccatctgcccatatatacaccttatcatttggaacatttaattttaaatataaattatttttagataatttttcttcaagttcacctatgctttgtcttaatagttgcactaaatcaatcttgctaatttgtaattctatattgccactacttactctactcgcttcaaataaatcttctatcaataattttagtctttttgactttgactcaagtacctttatataatcatttatatactctggttgtattgattcttcttttttaattaaatctacataatttattatagaagtaagtggagttttcaaatcatgagatacatttgttataagatcagacttcattctttcactttttacttgctcttctatagctctatcaagaccttctccaatattatttatattttcagctaaagacgtaaaattatcattcccagtaatttttatcttataatctaattctcccttttttattctttctgtaccttctattacgtaactaagatatgaaagtcttttagttatatatattgtaaatcctaaaaaaatacatatagaaaacagtaatcccatacctatacttcgagtgctaattaccatgattaaagctaaagatattatcactataacaataactttccttgctaaagatactttctttatagcgttactgacctcccttacagtttttattaaccataaaatcactcttactataatacttgtcttaaatatacacattttattttctaaataactcaattgcacatttataaaaaatatattatttgatactatcagtaaagataaagaaactaatacaattacatcaatatgataagatacagcaagagcatacatagttaaaattgcaattgaaataaatactagtattacattaaattccataggtatcttactgtatattagtaaaaatacattatttctttttaaaacttcaccttttattctgctatataaaatgatagataataaacacacaattgctaaacttaaacaagctacaaaaaataatcttactttttctgtagcttgtttaaatatttgaaaattagtgtatactattccatcttctatagttggctcttctggaaaagagacatatgcctcaaaggcttcatctactccatttagttccatactcagattattcagttcaaatttttctccatttattgttttaatatacgagctctttcctacattatttattatctctatattacaatagctcttagttttttgtttaaaatcatctaaattaccatatgatgtatttgtataaaatactcctgtatatgtattaataacatacacttttatattttttagataacttaaatattcttcagaagcttgtttattaatcatgattttatcatactcagaatcattactacttaaatctatacttttactttttgtttggagtttacttttttcttcactagttaactgactatccacagatatcttaaaattagataataagctttccactgttccttcatcaaatatattactatcataaaaatcattagatatattaaaaatcccactctttgtagaagttttttgtatattgtatttaggctcagcaagtcctattgtagccaacaatatagttaatggaaatgagatagatattatgattaatgaaactaattttaatgctctatatttttccaagttgcccacctcatctacattgtcagtattttatataaaataaagtttaagaaaagcataatccccatagagtaaattaaactctcagagaaaaaattaaaacatattaaaattcctaacatttgtgtaaatgtaaaaatgactaaaatcaaaatgcaattaaatattaaactcttttcttttataatttttccactaaaatttttcaatcttataaccaactccccacaccacctttaaaaatcttggttcttttggatttatttcaatcttttctcttattcgtctgatatgtactgctactgtattttctgaattaaaactttcctcattccatactttttcgtatatctcatctattgagaaaactcgtcctttattttctaaaagaagttcaattattttatactcaattggggtcatttttatgttttcaccatcaattttaacttcttttgttagtgtatttaactccaaagctccactttttaaaatttctttacatgtatcttcataattacctaaagttacatatcgtcttaagtttgatttaaccctagctataagctctaatagattaaatggctttgttatataatcatcagctccaatatttaatcctattattttatctgtatcttcactttttgctgaaattaaaattattggaatatttctttcttctcgtatttttacagttgctttgattccatctaatttaggcatcattatatccattagtattagatgaatgtcattctctgttattatttccaaagctttcattccatcatatgctttatatattttaaatccttctgatttaagatatatttctattgaatcaacaatttctttatcatcgtctactactaatatattgtacatattttcacttcctctattgtataataatacttatctatattatacaatatctttcacttactttctcaacaatgactaaattgttatattactttggcttacatttttgtaactttcccttataactatataataaaatataaatcttaagaaaatattatcctaattcttaaatatttcttaagatttaagataaattgagatttatttgaataaattgatttgaattatgttattttcagattacttttatttaagtattttgattggattcagctgaattaatgtatattaattcttattgaacagtttttatttttggggtggaagaatggtggaagaattacatttcactaattttcttccaccattcttccacccaaatatacttagaaacatttatttcactgcaataatagctacttatttaaattctatttttatacattctatctactatatactgtacatattctattaaaatttatataaataaaatacaaacttatttcatttttttaacatgttcagaataataaacaaaatgaatgtagaaaaagttataatttcataccttcattttatttattatgtatctagctgtcattttcttattttaaattcttaaaatattcttctaataaatttaaaatatcaccatctacttcatcatccttactacatagtgctgacattaaacttaatattgaatttttatgtgtattctttaaaaattcttttgtttaaaatctctgatattatttttcttttactaatacattatagtgtgtacgcttatctattttctccgtttctaaaaactctcttctttagtaatctttttaatactgtaaatatagttgtatctttccattcatatttttgttccatagacttggtgatttctcttgatattaataccttttctgattcccaaatatatctcataacttttaattccgcttctggtaatttactaattttcatagtatacatccctttaccaatttatgtatatgttaaattctatatcaataaagttttacaaacaaaagaattaaggtaaataattacattcgatttttactatatcattcttttaaatttctataatactcatctaataggtctaacttctctttacttacatttttatgtgtagtggtaagtgaacgcattatttttatgcttttactagattttagtacctttttcttaaaagtataatattctttattatctattattattttataatgatattgaaaatttataatatatctagccaaataccttttagcaactagcctttttagtagtatttttattgtacttttatgccatccataaatctgttttatttcttttacaatttcttttttaggcattagagtgtcttttttacataaatactccattactattaattctgctcttaataatttttctattaatatttcttctttcaatttatgtcacttccttaattcttctaacttaaattaataataggagctttttaagacaaaaactagaggtaagttttaccaaatattctacatatttagtctgtttttttaaacgtaaaataatattcatatatatatatttgtttaatttgcaaacaatgctaccaaacaataaatagctctattgtattattttagttgtagaatagcactaaatcgttagaatcaaagaaatttagtagcacaaaactatataggctaatgcttataaaataaattataagttatgttaacaagttactaaaagcatattttatttttgtttttatgaaagttttttaggtatgtaataatatatatcttttaaaaatatgtattcatgtatacatattttgacttattatactgataattcatataattattttgattttatagatacacagttagatgattttataatagagcataaaaaaaatgtagtataatcttgtttatatcaagttatggtattggtaagtaagtataattaaatagacattattttctgggtcctctttttattttcatctgcttttaaataatattattgacattgatatgactgtagttttctttattttaatccattgcttatatcttttctaacaagaaatgtcattttaaatcatttctataaattgtaaaataatagtatatttgtcatagaaagtgatttttttgtctatatatggtaaaatatagaaagtagaaatcaacaaaataaaaatttatatattattaattttatatggaggggaaataaatgaaaaataaaaaaggatttactctagtggaattattagtagtaattgctataataggaatattggcaataatagcacttccagcattatttaaaaatatagaaaaagcaaagatagctaaacttgaagctgatataagtgcaataaaaagtgcatctcttagttactatgctgatgaatccaagtatactgatggaggaatgatatcatgggtaaagaaagatggaaaaataataataaatgggggttttaaagatgacccattagcagataaaatagaaaatttagggatgccttataatggttcatatctgttaatgtcatctcctggtcatgaaaaatatctagaattaagcatacttccagaaggagaaataagcaaaagtggtctagataaattaaaaaatgattatggaaatttaatagacataacgaacgatcaaaataaaataaatattgtaataaaacttttaaataataaatcgaatacttaaatacaataaatttgatttaataattactgatgaaataaacaatcttgtttggagaaatgaaaaaagcactccccaagaatagaatgcttagttataactacagaagtgtattggcatacacttctattttttattatatcacataatttatgttgctaaaaatacctatttaagttgtttttaaattgtgttgagtaatattcttgatagtttatacattaatgaatttcaaaaaaataagcactctttataataaaaagtactttagtgtatgttaatgtcctatctaataaaattgtaacatgtcttatgctttagtatgataattttcattctctttattgttgcaacttatactatagttttgctaatttatctgcaaacacaacttctttattgcatgtgtatcaaccaaaaacatcagaatacttacttaatacatctgcaaaatcgtatctttcatctatagtattcttatttgacaatataacaaaaaatgaatcgagatatgccttttttataattagatatattttataaattctagcatatcatttgttattttctgatatgctattgatgttttaaatcttctatttattttattattttttacttttccaattgtacctttataggagttatatttatgtgatttatgaaaaaatgctatgcatttaagttctaattttttgataatacatctaactttcttttgattaataatgataccactatttttaatgtggcttccctgaggcacacatcttttttaaaaactcaagctcatcttttaaaaatttattttcatattctaattcttgttctcttgttaatttattttttctttagtgtttttgtttttattcattatggtcttcctttcattttgaaaaaggcatcaacaccactatgtaaaaatttttgttttcatgttgctataactgtgctattgtttattccaaaatacttagcgatttattgtacactatacttagttatcatcatatagtttataacatctaacttgaaccatatagtatagaaaacttttttatttttagtgcaccctctcctaatatattaacccatctttcaacttgagaatggtcataaactccatattgttttactattaaaatatctcttccttctctattcaaataaaatttagctacttttaatttgaaattaaaatcatatttagtcatacataaacatctcaagcgttagatttttactctaacaattatggtgcagtacaaatattgtataatactgattttctattgacaaaagaatataaaagagatatatttgtattataaagatacaaatatatctcttttaaaattactaaggaggataaaaaatgattcaaaaaaaaatttttatgggtttttgtggtttccttggatttttaagtcttagatatttttcatctggcaatgttactgatcttacatatattggattttttgcttttttctcaaactttattatagcaaaaataaatggtgataaagcagatgaaaggtatgtacaagatgaaaaagcagctatggcatttacaggacagcttgctattatagaattattcattttatggtgtattactatagtgtctaggaatgtagaattaatgtgtgttttactatcaattacatatgcaatcactttaaatgtttatgctataaaactttatattttagaggaaaaataatatgcccaaattcatttgtaacctaaaaaaatatagacaattaaaagaattaactcaagaacaattagcagaaaaagtaggagttagaagagaaaccattatgcgtttagaagcaggaaagtataatccttctttgaaattagcaatagatatatcaaaaatagtagatacacctattgatgaattgtttatttttgattagtttttgcattattaaaaatgtgttttaaatacaaacttaaattcaatctttaagtcactcctgactgaactatacccactgttttatacagttaaaacatgtaaaagtggttataaagtactagtgtcaatcattagtactttttttattatattcatataattaatagctatattttaaagtttactatctaaaaaatagcacgtcaaataaaaccctagatatttaaatttttttagagctacttaaaataaattatgctatctctgtacttaaatatttcctaaattcaagtggagacatagaatttaatctcttttgatatctaaaattattatagtaatatatataatcatctattgctttgactaattgttcgtatgtatcaaatttccttaaatagtacatttccacttttaaaattccccaaaatccttccataggagcattgtcaatacaatgaccaactctcgacatactttgtatcatgccttgtgttaaaagttttgatttaaacaccctgctagtatactgatagcctctatcactatgaaagataggttttgcatttggatatacttctattgctttattaaaagtttcgaatactaagttattgttatttgattttccaataacatatgaaactatgcttctatcacctaaatccagaattgcacttaaataagcctttgtcccgttggttaatttaaattcagttacatctgttaaccatttttgagaagttttatctgcactaaattttctatttaatacattttcagcaattacttctggtgtacatttaacataactaaatttcttttttctacaaatagaccttaagcctacggctctcattagtctgtaaactctcttgtgattgacattaagtttatactctctgtttaactgcaaggtcatccttaaagagcaaaaaactcccttcttttcttcatatatattagttatcaaagttgctaatttaatgttttcaagttctaaattacttttatctcgattgagccatttatagtatccagaacgatttactttagcgatttcacataattgcataagcgaagcttttttttcattgaataaggattgaatagctttatatttattttcattcttggatagtgtaattaccaccctctttctatgttttttaacttttttaagaatgcattctccagttgtaatttgtgtttttctgcttttacaattttcaattccaactttatttcatctaattgagttaactcatcttctttttttgctttacctcttcggtcttctaaaccaactataccattttctttatatttaagagtccatcttctaacttggctgtatgaaacaaagtatttttttgctattaaattgtaattaaaatcatgctcaatacaatctttaacaatttcaaccctttcatctaatgttgtttttctagtctccataaagagtcctcccttcggggtttcttttatctccttatgaagattatactccttaacccaagcttttagtggattaacagacctcattttatatttttttgagatagtgtcataagatccttccccatttagataagattctatagcatttaatttaaactctttagaatagcatgatttgtgactttgttttattaaaccatcatttccaaaagtttcataatttcgcatccactctctgaatgtacgttttccaatatttaattcttccattatttttattactgaattttcaccctttaaatatgattcaattgcttcgattttttgctctgatgatactttagttttagacataacaaaaccctcctagttttagacagttttacatatttcaactgtctcctaagaggggtatagttcagacagaggggctttttattttttcaaataatttaacgttcatatataaatttattaatttttcagctagatatgttgaataatagctaattctattgtattattaatctgtagaataaaactaaatcggcaaaactagagaaatttagtgacgcaaagctatagggactaacgcttataaaataagttatgtcagccagttgccaaaaagatattttctttttgtttttcatgaaagttttttagggggataaatacattatgtttagagataaaatggataaatgtacacatatgctaactgcttatattggtagttcatatgattattgtgattttatagatacacagttagatgattttatattagagtacggagaaaaagttgtggaatcttgcttgcatcaagtgatggtattggtaagtaagtataattagacagattttcttctagaaaaccctttttagttttatctacatttacattaatatattggtaatataaaatgtttaaatttattttcatattaagaataaataaaaatgttaactaaaaattataattaaatagacatttatgttaatctatgatataatagtatttgtggtaatacacaagtaaatcaagtatatcttgatataggttaataggagtatttttaatgaataatggaatagtaaaatggtttaataatgaaaaaggatttggatttatatcaatggaaagtggagatgacgtatttgctcatttctcagctatacaaacttcaggatttaaatcattagaagaaggtcaaaaagtaagctttgatatagttaaaggcgctagaggtcctcaagcagaaaatataactatattataatatatagatttttcggaaagactcttttaagagtcttttttttatttacgcattttgtaaaaaaggaaaaaataacttcaacaagaaaatacttaaaaataatacttagtctaaatactttttataaaataaatctgacaaaaatatatttataaagtatgtacttaaacctacaagtactcttttaattagaatatatagtaatataataattttagttgtggcacatcaaaattttcaactatctcataaatacatactctttcttttgtattcaattctgatataacacttttagtaatttgttaataaaaagcaattaaaacatatctatatgtttcaatgttctattttttcactgaaatataataaatataaaattagttaaaaagtaaaaaatctacaataagttaatttgatttaagtttttaaatttaaaatactttaaagtattaataaaaattaaaaataaaataactacctatggaaatgacattataaatagattttttcttaactatacataataaaacataacaaaacattataaaacataacaaaaacttagacatcgttttcttagtatgatatactaaaaaagaatttacactaatttactaagggggaatatcttatgtttaaaaaactttcagtactagctttagctatgattatttcattaagtattactgcatgtaattctaaagaaaacaaagctaatgatgaatctaatactaaagtgacaacagctgatgattcaaaagaaaaagagactctttttgtctattcaggggcaggtttaaagaaaccaatggatgaaatagcaaaaaaatttgagaaagaaaataatgtcaaagttgaatatagctatgcaggttctgcacagctaatagctcaaattgagacaagtcacaaaggagacgtatttattgttggttctgaaccaatttattcaaaggcctttgaaaaagaacttgtaggtgaacataaaacggttgcacatcatacacctgcaatagttgtacctaaaggaaatccagctaatattcaaaaattggaagacttaaataaagatggagttaaacttattttgggagacaaagagtctaatgctataggtaagactacacaaaaaatacttgaaaaaaataatttaaaatctataaatgataatgttgtctctacagctgcaactgtaaatgaaatgattgtacagttaacatcaagtaaagctgatgctacaatagccacaaaagattcggtctttggcaatgaagatgtagaagttatagaaattgcccaagataaaaatatagaccaactcatatcagcaggaatcgtaaactatagtgataaaaaagatttagctaataaatttataaattatatagagtcagatgaagctaaacagatatttaaaaaatatggttttgaacctgttaagtagtgattaaacttgaaaaataaattttttactacactacttactggattttttgctatagtctttttttttattgtatcaccacttcttatgttaatcattaaagggataagttatgttcctatatgcttaaaatccgtggaagtacagtatgcaataacacttagtattaaaacatctttaatatctactatagtatgccttttattagctattccagtagcatattttttacatattactaaattaccatttaaaaaactgattatacagataataaatctccctatgtctcttccacacttagtatcaggaattgctcttttacttttgtttggaagaatggggattggagattccatttataagatttttaagcttgattttatatttacaaagcaaggtatagttttagcacaagtatttgtaaatcttccacttactattaaaatacttcacacttcactaaatgaaagtaatgaaaagatgatatttgttgcacgtacccttggatgtaatagttgggaagcatttagatttataattcttccaaatctaaaaactggaatcatatctgcaactgtaatgacttggtcaagagcacttggtgaatttggtgcagtagctatgatagcaggttctacacgtatgaaaactgaaattattcctacatctatatatttaaatatgtctactggtgatatagacattgcaatcggaatagctgtaattttgatatttatctcacttacatgcttgatgctttttgagatattttttaatagagaggttgataagaattaatatgttaaaaataaaaaatttatctcttgatttacctaattttaaattacaagaaaatagtttaaatattaataatcatgaatactttgttttattaggagctagtgggtcaggtaaaactctattcctagaaacattagcaggaagatatccatctgctaaaggaaatgtatcatacaaagaaaatttaatatcaaacttacctccagaaaatagaaatataggatttgtatatcaaaattttgaattatttccaaatatgaatgttgaagataatataaggtttccacttaaattaagaaaaatacctatagatgaacagattcttaaggctaaccacttgtctaaattaatgcagatagaagatataaaaaataggtatcctaaaaatttaagtggaggcgaaaagcaacgagttgcttttgcacgtgccttaatagctgaacctgatatattacttttagatgaacctatgagttcattggattatattacaaaaaaacatataagcaaaattttgaaggatgtctacataaaatacaaaccaacagtgattcatgttactcatgatatttctgaagcaatgttttttgctcataagataggaataatgaacaatggaaaaataaatcatatttttgatttaaatgaagaaataaaaaataaaggagaatcttttttctatgaatatatttgatattttgagagattatctattagtacaagtcgataaatataatttaaatatggatatgataagtattgtgtccaaatctctatcttcaaaagaagcaattggaaatactaagcgtaaagatttcccaattatagttggtaaagaaataatgcttgaagctgactttaaaggagctaaaggacaagcatttacttctactccatctacatttgaaggttctttaaaagacatattatcattagatttacatgacaatcctcatgatagaagtctttttatagcatcattaaatgcagttatgaaatacttaggcaagacggatagaaccattcattgtaaaaataacgagccagaggtatgtgcaaaaaaattccctgagtttataaaaatggaatttggtaatccaaaagtagcaattataggatatcaaccagccataattgataatattaaggactttttcgaaacaagagtattagatttaaatcctgaatttgtggatactattcaatataatgttaagattgaagatggtatacgagattatgaagatgtaatatcttgggctgatttagtgatttgcacaggaagtacattatgtaataactcaattataaattttctatcacttaacaaaccagtttactattatggaactacgatagctggtgcatcaaatattttaggtttaaaaagactctgtttttgtagtaaataagcaatcatatcatcaaggagtacacaaatatatatgtgtactctttaaatttaaaaagttattacttttattctaagtactaaagtaaaattctattaaaatgaatcccgaataaatgtacaatccctttaaatctcaattcctatcaattattaatattttgattagtcttatacataaatgttttctttattttaaactaataaaaaaaattttattccattaatctactctatatttttcagcatttaagaaataatttttagtactttgtttgataatataactaagacaacttttcaggagatgattaaatgacatttaagaataaaaaatttactataaataaatatgaaattctatctattattctagttttatgcttgattttaaccggttttagtagctatgtgaattatagtcataaaaaatttaaagattatgttgtcttctatgttcagcatcaagatgatgaagtgttgtgggctgggagtgctattgttaatgctataaaagaaagaggaaaaaatcatgtatttgtagttttagtatctactggatgtggtatatccgtctttgataaatataaaaaatatgaaaacctaacaaatatacaaaaatcagaatatagaaatagagaatttttagcttctcttaatagccttggtgtaataagggaaaatataatattattaccagaaacaaatacaaatggtaatactgacttcaattacatggaaaaaattgctcttacatttgaagaaaaatttaaaaatgtaactcatatagcacatacttataagttagatgaccatttacaacatttaaaaaatggttctgttatccaaaatttatataatgttggtaaaataaaagatgctaaatattttgtaaaacctaaatttgctgataaaataacttttaataataagatagtttataaagctcattctactgaagactatgaaaaggttaaaaatgcctgtcaacaatacaaaattgttgatgaattagaatatagagaaggtattggctataagtctgaccataaatcatttgataagttattaaataataaagatgttcctgctatacttcatacacctaatttataagaaatatttattcttttaatttaagttataagaaggaaattatttgagattttgtgatatagcactttttgtgctatactactttttctcattcaactattacccatatctaatttcatcatctcttaaaatatataaagatatcatcattaaaacctataagccttattaaatactttatacatatctacattaaactacctatttatattaaactacattaaaataaatatttgttataaattcttaataattatgaaactcatttgttatttatatttgttaatatatgtttaaacctaaaaaattaataaacccaaaataacataaggagtgtgatagattaccctagatattttcataaacttttaccttcagattaatatgggcgtctatacttttaaatttactatatgcattgacaatatattaaaagtactagtttttatttcataatgaacgggcttactgttttctaatacctctttttggtataaaataaaaattggttaaaaataaaatttcaagggggttaataaattgaatcaaaatatattggttgtagatgatgatagagagatagttgatgctatagagttctatttgagacctgataactttaatgttttaaaggcatatgatggacttgaagcattggacatactaatcgaaaatgatattaagttaataataatggatgtaatgatgcccaatttagatgggcttaaaactacacttaaaataagagaaaaaaggaatataccaataattctcttatctgcaaaatcagaagatatggacaaaattataggtcttaatatgggtgctgatgactatataactaaaccatttaatccactagaacttactgctcgagtaaaatctcaacttagaaggtatataaatttaggtgattttagtaatacaaataactcaaatgatactaattatattctaaaaagtggtggcctagagctaaatacagatacaaaaatagtttctttagatggtgaggaaattaaaatgacaccacttgaatataaaatacttacacttcttatgtcacgaaaaggtaaaattttctcttcccgtgaaatttatgaaaatgtctggaatgaagatgcttatagttgtgagagaactattgctgttcatattagaagaattagagaaaaaattgaaattaatccaaaagaaccaaaatatttaaaggtggtgtggggcattggttacaaaattgaaaaacttaattattaatgattctaaagcaaaatttattttattattattactgtttctattagtttctatattatttgaagcagtttatgatttgaataataacttttcttataatattaattgttattataaagagtttgctctcccttatttttattttttcggtactcctgtacatttgtcaaaagtagaattagagtttgtctgcataggtattatattatcaagttttttattgactatactatgttttacattgtataaaaaaaataaacagactaaagtcaaattcttagagaatgtcataagccttttttctaaggtaaaaatagaacttacacttatattaactttgatactattaaccttaaggtttcatgcatttacaagtaataaaatgttttacaacactaatttaataatctacaattttataattatatctatagtctatataatatatgaaaatattaaatataataactataatctaaaagatatgtctataacatatgtattcttttcaaacttacttagtatgtataataaaaaaactataaataaaaaattagctatagtatttttaatatctatagttgtacaagctattatccaatatcttgttttgatattctttatgtatatatattattctgaggcaatagctatagtaattttatttacacttgtaaacacagtttttcatttttatatatacaactttttatctgttaagtttaattacataaataacatatcaaaaaatataaaaaatatagaaaatggcaatttaaagtataaattagaagttataggagatgatgaaatatctactttagccaaaagtataaataatataacaggtggtcttgaaactgctgtagatgctaatataaaaaatgaaaggatgaaggcagagcttatcacaaacgtatctcatgacttaaaaactccacttacatctatattaagctatgttgatatgttaaaaaataatgactttgacagagagactataaatgactatataaatattttagataaaaaatcacaaagattaaaattattaatagatgacatatttgaagcatctaagctaagtagtggagatgtagaatttaatataacaaaaaccgatataagagaacttttaattcaaagtattgtagagtttgaagacaaaattcaaaatagcagtttagattttataatagaaacacctgaatatgctgtttttaccatgatagatggtaaaaaaacttggagagtttttgagaatctaatttgcaatatactaaaatactctatgcctaacactagggtctatatagatatgtttataaaggaagaaaatataatattaacgtttaaaaatatttcaaatgataaactaaatctaaagccagaagagttaatagaaagatttagaaggggtgatatatctagaaaaacagatggctctggtcttggtttatcaattgctcaaaatataattgaattagaaaatgcacacatggaaataattatagatgctgatttatttaaggtaatgcttacttttagaagagttaattgatatattaatataaaaatatattttaagttatttaaacaagaaaaaaacctccttagaggtctttttctaaatgttggggtttatatttacatattttttgattatacctttttggtgtgatattaatacattttaaattatatttctctataattcatcacatatttcatctctctgtatctataatatcacatagtgtttccataatcagttacatctctgttacctaagattacaattttgtaatatttgtaatcttaggtacaaatttacatttgttctttaatataaatatattctttctatttaccctaaagaccttttaaatcatatttttctaagaaaagttttaacttagaataaatttgttctgctccaccaattttatttgattcaatatttaaagctagtaatggttcatgtagtgatattctaagtaaaaaccatccatctccatttgattcatcacaattaactcttattccttcaaaattatttggtgctacagaccatccatcaatactcttaacatgagaatctaaatcttttaatatatcctctgcatatggtctaaaatcttctttgttaatgcctattctaacttctttctcttcttgagcttcttcaaggttttctatcaattcttctatagtctttccttccaaggatagctttgctacttttattaaaattttagctattaaatatgccccatcatctaagaaataattttcttttaaagcagcatgtccagacgtttctatagctaaatggcactcttcaccttcactattcaatcttatagcttcatttattacatttttatatcctcttttaaatctatgatgtcttccttgtaattcatttataaatttagcaagtccttcagaagtaatcgaatctgttactatagctgtttttggatgttcttctaatactattgatgatataacagctataagagcatttttatttattggtttgccatttttacctacaatagcagctctgtctacatctgtatcaaagattattcctaggttgctattattatccaacacagctttacatatgctttccattgcttctttgttttcgggattaggtatatgatttgggaacataccatctgggttcaaaaactgactgcctgtcgtatctgctcccagtatgtgtaaaactttttcagcaaagaatccaccagctccatttcctgcatcaaccaatatcttaagcccagaaaaaggcttttcataatttttacttgaatttacaccttttctaattttatctatcaataaattagaataatcttctattaaattttttactataacttcaccttttttatttacttcctcatagtctacactatcatttttaacagctatatccaacatctcttttatattagttttttctaaacctccactttctgtgaaaaactttaaaccattatagtaataaggtaagtgacttgctgtaatcataatcgccccatcagaattgtatccatccataatagttgtcataaacatagctggagttgtagcaatctcacaatcaattacattacaatcatcattagttaaagtttcaataacagtacttctaaattggcttcctgttatcctagaatcagttcctatggcaacagttactttatctttcttagtcttttcttttagccaaatatgaaacgctttagctattttttttacttcttctacagttaggttaacttctttagaatcattttcatacgctattcctctaatatcagtaccattttgtagtttatataggtctcccataaaaaattctccttactcaaccaaaatttttattaaatattataaaatttcttgtttccacctaaatttttactattaaacagaaacatattataattttattacatggttactttatactttcttttagttcttctattttatctttatatgaaattggaggcttatcattaaataaagctgaagtaccaacaacatatatatctacttttttaccattcataagtttaatagtatccttatttatatttccatcaacctctataaatggaggattatcataatcttttagtatctctgtaagtttatccaacttatccaatacagaaagattaaacttttgacctgcaaaccctggatttactgtcattactaagataccctcaactaaacttatatattcttctattttatccacacttgtttgagggcttattgctaacactggccctataccataatttcttaacttttgtatatcagcttttacatttgtacttgattctacatgaaaagaaatatattttggctttatataagacatcatatcaatatatttatctggagtttctgtggctaagtgtatgtctaaaggtattgttgtattttcacttattgattttaataactctggtcccatagccaagtttttaacaaatattccatccataacatcacaatgaagtaattttacacctgcttcttcaagagcttctaattcctcttttaacttcatttggtctgcacacattattgaagcacaaataatagacataacgctcccccttgttataaattatatattatatatatttataaattttctttttctatatcatcaatcatttgtaatcttcttgcatgtctttctccattataacttgaatttaaccattcttcaacaattctcattgctaatcctttcccaataactctttctcctaaacaaagtacatttgtattattgtgttctctagttgccttagctgaaaaacagtcagaaacaacagctgctctgattcctttaaacttatttgctgcaatagacatgcctattcctgttccacaacaaagtatgcctaaatcagattttttactttgaacattttgacttaccttttttgcatatattggaaaatctacactttcttttgaatttgtacccacatcttcaacttctatacctttatttattaaattttcctttatatattcctttaattcataaccaccatggtcacatccaatagatattttcattaaatagcacctctttttataatttttttgattactttcagactattttataattatcataaaaataaagtattgtaaaaataaagctgtcccattgtagaaatttctttctatttttaagacagctttaattgacttatgtcaaatcaatttgttatttagatatatttatatctataacaactcttttatattttttactatatcttctgtagttaaaccatagtgttttaataaatcagctggtgtacctgattgaccaaatacatctttaacaccaattcttctaactactacatctttagtttctgctaaagcttcacatacagctgaacctaaaccacctattatactgtgctcctctgctgtaactacttttccagttttcttagcagtttcttttattaatgcttcatctaatggttttattgtagatatattaacaacttctacatttataccttctttagcaagttcttctgctgcttctaaggcttttgctaccattattcctgtagctattactgttatgtcagaaccttctcttaaaacagttccttttcctatttcaaatttataattttcactgtttacatcaggagttgcagctctacctaatcttatataaacaggtccattataatcaatagatgcaagaatagcttgtcttgcttctaaagcatctgctggatttaatacaaccatatttggtatacctctcattagagatatatcctctatagcttgatggctaccaccatcttcacctactgttacacctgcatgagtagctgctatttttacatttaaatttggatatgctacagagtttcttatttgctcatagcctcttcctgctgcaaatattgcaaaagtactcgcaaaaggtatttttccacaagtagcaagacctgctgctgtaccaatcatgtcaccttctgctatccccatgtcaaaaaatctatctggggcaacttctttaaatgatatactttttgtagcttttcctaaatctgcatctaatactactatatctttattttctgcaagttcttttaacacttgtccgtaagcttctctagttgctattcccattcctatagacctccttctaaatctttcaatgcttgctctgcttgttctgcatttggagctgttccatgccatgcagcattattttccataaatgaaacacctttaccttttactgttttagctattattacagttggttttcctgtaacttttttagcttcatcaactgcatttcctatttcttcaaaagaatgtccatttattactattacattccatccaaaagatttgaatttgtcatctactggatttacattcattacttcttcattagaaccatctatttgtaatccatttaagtcaacaaatgcaattaaattatctaatttgtaatgtgatgctgtcattgcagcttcccatatttgaccttcttggatttctccatcacctaatatagtatatactgtatagtctttgttatctaattttcctgcaagtgccataccatttgctgcagatagcccttgaccaagagaaccagtagacatatcgattcctgctacttttttcatgtctgggtgaccttgtaacttagaaccaaattttcttagtgttattaattcttcttctgggaaaaatcctttttctgctaatgtagcatataaagctggtgctgcatgaccttttgatagaacaaatctatctctatcagccatttttggattttctgcacatacgttcatcttatcaaaatataatactgtcaacatatcagctattgataatgaaccacctggatgtccgcttttagcttctgcaaccatttttattatgttttttctaatattattagaatgatctctaagagtgctcatactttcttcctcctgttattttttaagaccttacatttttttatcctacagtagattttacaattttttttaaaataatacaaatgtttttttaagattttactgctacttttatttcttccccgttcattaaagctgtaataccttctttaaattcgtctaaaccaacagttctagtaactaaagcttctgtatttactttcccacttgccattaaatctaatgctgtaatccaagaacttggcttttgagatctacttcctatatattgtaactctctttggattattgcttcttggtccatttcatttaattttttagcaaagattccaacttgtacgaaagtacctttttttctaagcagtcttaaggcttcgttaactgctggcataaacccagaacaatcaaatcctttgtttactccatttccatcagtcatttcattcactacatctgccaaactttcttccattacatttacagttctatctactccaagatttttagctatttctaatctttccttatcttttgtaacaccagacattataactgtagcaccttgagatttaacaacttgagctaataataaaccaattggccctggtcctattattaaaactgtatcagaactttctatagtagtcttttcaagagctgcatgaacacaacaagctagtggctctgtaagggctgctgataataaagatacattttcaggaagtacatgtatgctttcttctcttgatagtacatactcagcaaaacttccatttacttgagtaccaataccttttctagttgggcataagttataatctttagtttcacaatatatacatttctcacaagttgcaaaagtagtttctgatgtaactctatctcctacttttatatctttaacatcttctcctacttctacaacaattccagaaaattcatgacctaatgttactggggcttttatatttgcatattcacctttaaatgaatgtatatctgaaccacatataccactatattctacttttattttaaccttgtctcctgtagcttttggttcttctacttctaaaacttctacattatcatagcctggtttagttttaactactgctttcattatttttcaaccccttgtggtaaaattaatattttgttaaattcttcttttctatctcttatcatttcaaatgctttgtaagtatcttcaagtgagaatctatgagataccatttcttttaattttatctttccttcattaactagattgattcccttagtccattcttgtcctggaaatggtgcagaataagagttccaaaaaccttttaattctagttcttttctaaatatattttcaaatgcttcttctgataaagttatatctgaatatgctatccctaaaaatcctatcttacttttctttttagttataagtaaacattgttcttgagttatttttgaacctgcacattcaagagctatgtcaacgccttttccaccagtaagttcttttattttttctactgggtcaatatctttagcattgattattatatcagcccctaattcctttgattctcttaatttattatcagatatatcaactgctataattgttcctgctcctgctattttaagtccttgtattaccaactgccccattgttccactacccattacggctacagcgtctccaacttgaacacctatattaagtactccatgcatagcaactgctagtggctctatcattgcagcatcttcaaagtccatatctcctattggaagtacatttgtagcttttatatttacatactctgcaaaagctccaaaacttttagctcctaacattccatggtcatcacacaatgaaaataatcctcttttacaatattcacattcattacaaggtataaaaggaattgcaactactctatctccaacttttacattttttacatccttaccaacttcagcaattactccagaaaactcatgtcctggtatagctggaactggatatttccaatgttttaatactcttggaggatctgacccacatattcctgctgccataacttttatttttacttcatcactttcacatggttttatttctatatcttcaaatctcatatcatttgtgccatgtaatactgctgctttcacgataaatctcctcctcttgtattttgtatttttaaaaatttataaaaaatattactcttttttagtagctgctaaatgttaaattttcgcatactttactaaaaaagagtaatctctattaactacatattagaatattccaaatgaagaaactaattgagataatttcaatattccccattttagcaagtttccacctgtatctatacttgtaaccattgttgttccttctggcatcatatttgcttgttgtaataattgtgtatgaacatctgcaaagtttgtagccatataaagtgatatagctattactattgttcctgttataactgattgaactatattaccttttctaaagcacactataaatgccatataaaatggtattgtcgctaagtctccaaatggtaaaactttgtttcctggtagtataactgctaagaacaacgttataggaacaagtataagagctgttgatataactgctggatgtcccgttgctactgctgcatccagacctatataaagttctctgtctccatattttgcttgtaagaaatctcttattgattctgaaattggaattaaaccttccattaatattctaaccattctaggcataagtaacattactgcacccattgatatacctacattgaatattcctgctacatcatatcccgcaagtgctccaagtattatacctagtataatccccatcatcattggttctccaaatataccaaatcttttttgtatagagtctgggtctgcttgtattttatttattcctggtattttttcaacaaatttacctactaaatatccaagtggagcaaatgaagctgttgaaccagttggtaatgctataccttctaaatcataaaactcctgaacattttttgctgtcttttctgcaataaacagtactaataactccattagtattgcacagaatatagcccaaacataacttcctgttactatatatccaactgcacctgctactataaagtgccaataattccatatatcaacgtttaatatctttgttttattgaagtataataatagtaagtttactaataaacaaactggtattaatattggtgcaactggtgaagcccatgttgctgatgctgttgttggccaaccaacatctattactgttaaattaagtccgaatctttcaaccattccttgagccgctggccctagtgttgatgttaataggtttacaactaagtttatacccacaaatcctataccaattgtaagacctgactttaaagcttttgtaaacttaattctaaatatcattcctagtactacaattgttattggtagtattactgtcggtcccatatttaaaatgtattgtactactgctaataatttatccatttataaatcctcctttttctgttttataaaatattatttcaatgtatctatgataggattattttaaagcatctaatatttttttatctaatgctgctgtatttactccagttatatatgctgttgcttttattgctggtatattataagttgttggtagtatagttgttgatactattaaatctgctccttcttgctttgttgcacattcagctattttgcattgtataacttctgcttgtatattattttccttaactaatctctctaccttgtcacaaactactgttgatgttgctattcctgctccacatgctactaatatttttttcatttttatttcctcctaataatttttatttttatattttttatttttagtacttttttatttttataaagactttagtgtccttaaaacttcttctttatcagtagaactcatcaacttatcaactaactctttattttgcataattcccattaattctgttaatacagataattgactgtgtggttgattaagtcctaatatgaaagccaaatttacaggtactttttcatcttggtcttccatagaactaaatactactggttcattaaaagtacagactgatataaattgctctttaatatattctgcatctgtatgtggtattgctactccataatcacctaaatttaaacctgttggaaatacattttctcttgctaatattttttctccaaattcttcttttacaaagcctaaatcaaaaactttattatgtatttctttaaagaaatcttctttcgttttacaatccattttaaggtctataactttatcacttacaaaatttataaactccatatttacacctcctaattgcctttgtcttataccttagtttttcttgactttatataaagcatgttgcgtgccaaaaagtggctttttttgtgaaacaaaagaaaatgttttcccgaaaataatgctctcttccaggattttagctgactttcattgataaattttttttgatttttattttaatttttacttgttaatcacttaactagccatacttttttatattttttgtggttttttttgttagagaaatgatttttttgttttttacaaatggttttttatgtttaacaactattttataaaattatttattatgaatttaatttatttttatatattttttatatattctatattttataagaaatataggaaaaattttcatagaattgtccaataaaatttactttttacataaataaattcatatattttatttaccaagaaaaaagctaattctataaaatcatataaataaatttcatagaactagccttatatagagtaattaactacttagcaattgagtaattttaaattttatactaaagcaaatttttttgtctttcttctcggtactaataattagcttaaaagttcttttatttcatttttatcttcagtatttaataaaacttctaaagtatgctggtcattaatctttgaaaataagcttcgtatttctttcttattattttctttaagtgccagtagtaccaccaaatccaccataaatttattgtcccatactataggtttattcaaccttgcgattgctattgcaggctttataacgttttctggaagtccatgtggcacggctaccttagaggccattacaacacttcccattgcttctcttttatatacacttaatatatactttgaatcaacatatccaccttcttcaagttttgaaacaagagtatcaattatatactcctttgaaattccttcaaaattgtataaaatcaaatcttcatgtattaaattattcaactggttttcaatatttaaagctggttgtttactatttagatgctctaatactttattaataccatttttaccaagtacctcattataagaaataaaaggcacgtttttataatctatatcaatagttccacagatagcaataatattatattcagcttcaatatcatttaactcttcttctaaattattatttaaaaaagcaactggctttacttcaattaaagtgccatattccttaatttgtttttctatatgctcttttaaatttaaagctgtacctacaccactcaaacataaagtaatgattacatttttctttccatactcgttttttctgtaactaaatttatttgtatttatcatagcataattcttatttttctttaaatcagctattataccatctaaactttttccttcaatggttgcaagttttcctgcttccattgccaataatgtatctactctatttacagttttacatctaattccaagccttttttcaacctcatcaccaagaattaccaaagaacccatatcaattagaactagaataccttttctagcttctatcttttgaagctcttctaatacatgctctatcccctctgatggtgaatctgtaagtgctatttctatacctagtgtacattctatacctaaaatatgatttacaactttagacatttcaattccaactttaccatgcgtaactattactactttaactttatcttttatactttcctcattataacaaaatttatttatataataagccaaatatccaagctcatcttctggaaatgttacttgtgtcaaatcttctactatacccattatatatcttgacaactcatattccattggcattgatgcttttattttatctaaactcggatttattatagtttttccatcttttatcctacctatagcatgctcaatatgaattgctagagccaagtacagaccttgatttacatgcttaaactgctccttaataaatacaattaccttatccattatctccagtgtagactcttttaattgtcctccccagtctattcgacttcttctatcagataaatttttattgtttttaatagcattaaacttcttatctaacttttctataaatgcattttttaactcttcttctgaaaagcacttactttccaaaaccttaagctctttttctgcataattatatatctcgcttatctcattatcagataaaattctattttttccactcaccaattcactaatatctatatatatatcctcaactgaaaactcagaatacttttcatttttacaattacaatcataatatccactttttatataatcccttaaactatctaaatctataattaccttatcgctagaaaatatcgatttactaaaagctctagcacaagttacttgtatatcactctttaactgacctatatttccagtacacttataattcataagtgcacacataacttctttagttattataaaattcttgtttactcgctttgcttctctttcaaaaaactttattattatttcatatctttcagattttggtctttcactcatattaggtaaatttattaccattggtatacgtcttctaaatgtttgaagtaaattagaatctggattttctgttgtagcacttattatgagaacatttgcctttctattagaactactttctcctaaccttctaaattctcctctatctattaatgaaaataagatttcttgcccagcagcaggcaatctatgaatttcatctaaaaacaatattccattattagcttgttctacaagaccttctctatttgcatctgctcctgtatatgcaccttttactaccccaaagagttgagctatcaatagattaggattttctgcatagtctgcacagttaaacactataaatgggctgttctcttctttaatgttgttttttatagcatatttatacatacatgtagctaattcacttttacctactcctgtttctccatatattatagtatgaaggccattaggaggatacattattgctgacttagctagatttaccttttctttcaaacttccctttatacctatcaattcttcaaatccatcttcttctacaactttactcaccttcacatactttcctgatgatgctgggtctttatccttaatcccaatctttgactgatttaaattttcctcttttaataattttgaaactgcacttctcgatatattatatccattttctattaatatttcagttatttttctttcagacatttgaggattttcacttacaatttttgatatatcttttattaatattttttttcttctttctctcgaatctaaaatattattttttttcctaactgatatcacttcagacctagctacatttaacatttcagcaagttcttggtcagtatatggattttttttatcttctctttgtatctctcttaatattttatccatttttcgcctcctcacttaaaaaattaatctatttcaataatatgtttcaatatattatacaccaaaataagactaggcaaaatagcctagccttattacttagaatttccataataacctctttaatatacttataaagcgtagtttataattataattttaaaaaagcaccttcccaatccttcataaagctatctattcctttgtctgtcaaaggatgcttaatcatttggtttataactttaagaggaactgttgctatatctgctcccattctagcagcttgtaaaacatgtattggatttctaacactagcaactattatttgagcctcaatactatttacactaaatatatcaacgatttcttcaattaaatcaagaccattttgtgatatatcatccaatctaccaacaaaaggacttacatatgtagctccagctctagcagctaaaagagcttgtccagcagaaaatataagcgttacattagtctttatacctttacttgatagtactttcaccgcttttagaccttctgctgtcataggtatttttataactatatttttatgtatcttagataatttttctgcttcctctatcatacctttatgttctaaacttattacttctgcgcttattggcccatctactatttcacttatttctttaactacctctataaaatctctaccttctttagctattagagacggattagtagttacaccacatattacacctaaatcatttgcttcttttatttcttcaatattggctgtgtctataaaaaacctcataaaaaatcctccataattacatagttaaaatatgtgctaaacacaattatataatatcataaattacctaaattttacagttccattatctatagattcaactactgccaaagactctaatcttacatcattagcctttaaaagtgctcctccagcttgaaatcctttttcaatgacaattcctactccaactaagttagcttctgcttgctcaattaaatctttaagtccaagagcagctcttccatttgccaaaaaatcatccactatcaatatattttcgcctttgtttatgtactttttagaaactttaactgaatactctcttgccttagtaaatgaatatacattagtttcatatacatctttatccaaatttttagattctgatttttttgcaaatactacaggtgcattatcaaaatactgtgaaacaattgatgctatagctattcctgaagcctctattgtaaatatcttatccaccttttctcctttaaatctctctttaaattctcttcctatttcatttaaaaaagctacatcaatttgatggtttaaaaaactatcaacttttagtatatcatttcctgaaacactgccttctctcaatatcttttcttgtaaagccttcattgaacttccacctagccctttctaaaattatattaataaaaaaattatatttgttctaattttgctatctattcttgtaagtattttatattaaaatactaaaaaagctcctgtctatatcatagacaggagcttaaaattcaaagtaattaacttaatatataatttaaaataagtataaactatatcttcttcactcctgtagtcaagctattaatggtagcttagtagaaacatttgaaccatattatcaaacatatacaggtaaatatattaatttattccttttaattatatattataattctctattattcaacaaataattcaaactgtgtagaataatatattatagttactttatcagaactactttttttcaagtaaatttataaatttttcataaatatataacttttttcgatattatttaaaatttcttcgtcattgcttatattagctattttagcaacggctttttttaccccaatagactttatcaactcttgtaattctacactttgagtatcttcactattattataatgaagcgctgcacctattccaagaatcaaattgtcaactgataatccatatgattttgctgtcattaaaggtttaatcaatctatctttatcacttagttttcttaatggttcccttccgactcttaatacatcatcattaagatatggatttttaaatctatttaaaattttatcaatatatttatagtgcacttctgagtcaaaattgtattttttaatcaatccttctccactttctaccattgcacttttgactatatcacagataaatttatcttttatactctcttctatagtcttatatccttttaaatatcctatataagctgttatagcatgacctgtattcagtgtaaacaatttacgttctatataagccataaggttatcagctaaattcattccaactatagttggtatttcccctttaaatccttgtttttcaacattccactcataaaaattttcaactgttacatcaagaggattttcgtttttaccaggaggaactattctatcaactgaacagtttggaaaaccaacatacatctctaaatattctacttcttccttatttaaatacttaagtacctcttcttttaaagaagaacttgcgtatattgcattttcacatgctattatatttagattacttgttaatcccttttcttttctagcttttataccttttgcaattgtagaggctattttagtcaaaactaaaggtccaactgctgtagttattatttcagcctgtacaatctcatctattatttcttcttttatagatgaaaccgcacttatattatcaattacttcatctatacattctacatctcttatgtgtatagtatactttttatctttgtttattgagtttaatatctcctcatttacatcagcaaatactacatgataacccgacttaactaacaagcttccaataaaacctcttccaatatttcctgctccaaactgaatcgcctttttcattttaaatccctcctaagattagttggcaaaagcttccataaaagcttgtttgtcatttgaattttttagtctttctgttaagtcatcatctaaaactactgctatattagatagtatttctaaatgttcatctccaacaccagctattcctattaataaatatgctttttctccatcaaaatctataccattagggaattgtaatataactattccagaagataatatttctttttttgcttcatttacaccatgtggaatagcaactcccattcccatatatgtagtcattactttttctctttctaacattgctggtatatattcttcttttacatatccattttcaactaattttcttcctgctaaagttatagcttcttcctttgaaacactatctaaccctaaaaatatattattctcattcaatactttactcatagtatcaaccttcctttttaatattaattttatttatctataaatgcttttaatctgtttgtataaaaattaaaaactatatcttttacctctaatgtcatctcttctatagagaatttatttatcttattagtaaaaattatattgtctattaatgaaccacttatttcactcattatttgtctttgataacttggtgaatttttaggaagtaacataaaaactacattatcgatttcttcatttgaatctagcacgattctattctctagttttattattgataacttcataatatctattctttcactcatacaatgtaacaatagaatttttgattcttctatatatggaattgagatttttaatctttcttttaacgattcttttatagagattatatcttcactagattttgcaaatatttttgatgagtcttcaataagctcacttaaatctttactttcaaatttttcaaatctaatttcctctaaaaattgaagaatatcttttcctatattcatactttctgttatctgttcatatactttattcttacttttagtatcatttttcgcatttaaattgattaatttattttgagctatagattttattttttccttgattatctgttcatcatctaaactcataaatggacctacacatatataatttaaacttgtatttaactcaactgtagacactattaaatcaacatctttttcttttaaatactcttcatctatgtttatagctgatatggtttcaagtatatttaaattaggaaatttattttcaatcttagttgataagaatcttgaagtacctattccagtgggacatgccacaacaatatttatattagtattcatcataagatttttttctatggctgatgcaaagtgcattgcaatatatcctatttctgattcaggtattgaatttatatttagtttatcttttataattctagaaatcttttcaactccatcataggcatatgaatacttgctttttatttcatctaaaagaggatttcttatttctaatcccatattcaatctatttatagaaggccctaagtgatttgctaggtctttaaataacctctcgtcattttttaaacttattttaaattcatcttccgccaaatctatcatcttatttgtaatttccattatttctatatcatctaagtttaaagccttatggtttgaagatgacctttgctttgcacctcttatatgcatagttatatatccaacctcatctactggtatatccatgttaaaatctgtttccataccttttacgatttctttagctaatttaaactcttctgttatagataattcttttagaaactctttatccatagttatattttcaccattttttatcctctgtaaggctaatgaaatatgaactacaagccctatatatgcactatcagctaaatttacatctaaatctgaaagcttctttgttaatgtagcttcaacttttcttattatgcacctgtccattaaatttaaaagtctattttcacttaaaatttctattgctttatctgtttgtatattttcacttatatttctgaccatatctagtatttctttttcattgaatgaatcgtatataagatttacatatgcctctctaaagtttttttcttgaccttttaagtagacaccaagccctggttttctaacaagctcaatatcaaatctttccaaccatttacttgctaaggcaaaatcattattcagtaccccttcagatacctttaatatttttgcaaaataataggattttactggctcgttagaaactagtagctttgataatataattaaatttctttcttccttgctgtattctttttctattttttcttcttctaacaactcaattataaagttttgattttctatattttcctctaaaatcaatcccactcctggtttttttacaaagttaaaatcattttcatcaaaccatttttcaattccagacatatctctaagtacagttcttgaacttagctctaaagtccctgcaatctcagaaatagttattggaatgtttttctttgaattttctactatcattagtattatctttttttgcctagatgtaatcttcttttttttcaaattatccactcctaattagtggtactttttatttttatttagattctaatcttttaaataatgcatctaaatttgggtcatttaaaaaattgtttattgaaactatctcaacacttgaattattcttagcaactctttcaactaatgtattgtgagttactactatttgtgtatcatctggaagattatcaacagatgaatttgtaatttctatatttaagtctaagttttttattctatttttaaatctggaagctcccattgcactcgaacccattcctgcatcacatgcaaatacaatcttcttaatctcatttacttcaagctgtttttcctcaatatttttctcagagttcttacttgcagatttcatatcactcatttttgctttagcttcttctaaagaagtactgtcttcttcactttgatttgctgaagctctcttaacaaatggtgctgccactaagaatgatacaactgttgccactgcaactcctgctaatactggaagtaatcctccctttggagctagtgccataagtgcaaatatacttcctggtgatggtgctgctacaagcccagctcctaatattgaaaaagtcaatattcctgctgctccacctgccattgtagccaatattaaaactggattcattaaaatatatgggaagtaaatttcatggataccaccaaagaaatgtattattacagctcctggtgctgattgttttacacttcctctactaaacatccaatatgctaatagaactcctaaacctggtccagggttactttctagtaagaacattatagatttacctgcttcttttgcctcagctatacctataggccctaatataccatgatttattgcattgtttaagaataatacttttccaggttctataaatactgaaactagaggcaataaacttttgctaactataaattgaactccagattctataagagctgtccctgctactattgctggtccaattgcataaaatcctagtattgcaagaagcatacctattatacctattgaaaagttatttactaacatttcaaatcctgttggtatctttccatctacaaatttatcaaacttcttaattacccatcctgcaaatggtcccattatcattgctccgataaacattggtatatctgcaccaacaattactcccatagctgctgctgcacctattacgccacctctttgtcctgctattgctttaccaccagtataagctatcaatagtggtaaaaggtattttatcattgggtcgcctatagtactcaatttttcattaggcatccatcctgttggtataaataatgctgttataagaccccatgctataaaagctcctatatttggcattaccataccacttaaaaatttccctactcgctgtatagatgtctttattgtcgattgattagaactactcataattttacctcctcttgaattatattctatatcgatatgattcccttttgttatacttttattatagagtttatattttatagtaacaactttaagaaaccgtttctatgtcactttagataatgacatttgtcattttagtttttgtttaattttatttatgtagtattttggagtatatgattttgtaaataatactatttttataaaatatttaaatttaatagaaatgaaaataataattcagttaaataaatttattaaatgtacttttggatatactaatatagatttaatttatctgtatttttgaggtttatgcactctctagtaatattatcaatataaactatacaaatgtaattatatgaatcactaaagattaattttaaattagctactattaaacactaaacattatttaatatacaactttaccctataaggcaatatatattaaacaaatttaattaaaatagtttaaatttttcaaaaatctcaatatttgacaaaatactttaataaaattaaagaataagttataattaatactatcaattataaaaagtataaaaatataaggagtgattaaaaaatggcgttttattttgatacaccatcacatactttcagtgaataccttcttgtaccaggtttctcttctactgattgtatacctgctaatgtaagtttaaaaacacctgttactaaatttaaaaagggcgaggaagcagatatttatatgaatatacctttgacttctgctattatgcaatctgtttctgatgacaaaatggctattgcacttgctaaagaaggtggtatttcatttatatacggttctcaaactattgaaaatgaagctgctatggtagcacgtgttaaatcccacaaagctggttttgttgtaagtgattcaaatattaaacctgataacacattaaaagacatacttgacttaaaagaaaaaactggacattctacagtagctgttactgaagatggaacttcaactggtaaattattgggtattgttgcaagtcgtgattatcgtataagtcgtatggatttagatactaaagttagtgaatttatgactcctatgtcatctatagtttatgctaacaaagatgttactttaaaggaagcaaacaacattatatgggaccacaaacttaattctcttcctgtacttgatgataatggtaatcttatgtatatggtattccgtaaagattactcttctcataaagaaaatccacttgaacttttagattcttctaagagatatgtagttggagctggtattaatactagagactttgctgaacgtgttcctgctttagttgaagctggtgctgatgttttatgtatagattcttcagaaggtttttctgagtggcaaaaaataacacttgatttcattcgtgaaaaatatggtgatacagttaaggtaggagctggaaatgtagttgaccgcgagggattcctttacctagctgaagctggtgctgacttcgttaaagttggtattggtggtggttctatatgtataactcgtgaacaaaaaggtataggacgtggacaagctacttctataattgaagttgctcaagctagagacgaatactttgaaaaaacaggtatttatattccaatttgctctgatggtggtatcgtttatgaccatcatataactttagctttagctatgggtgcagattttataatgcttggtagatacttctctcgttttgatgagagtccaactaacaaagttaatataaatggtagttatatgaaagagtattggggagaaggttctgctcgtgctagaaactggcaaagatatgaccttggtggagataagaaactttcttttgaagaaggtgttgactcttatgtgccttatgctggttctttgaaagacaatgtaactctttctttaagtaaagttcgttctactatgtgtaactgtggagcacttagcattcctgaacttcaaaaaaatgctaaacttacacttgtatcttctactagtatagttgaaggtggagctcatgatgttatgttaaaagataatagaaatttataatataaatatactttaatcatttaaacaatgaaaaagagacttatctctattttgagacagtctctttttatattagtataatttttatttaactgtaaattcaagaagcttacttttaagttcattttctatttttgataattcaacttctgcttcttgtctctttattctaccatcatgttgtattttaactacctcatcaatagtagatattagagattgattagttttcttaattgtgtctatatctacaattcctctttctgattcttttgctgtttctattgttcccatcttcaaagtttctgcattcttcaataaaagctcatttgtcatattactaacttcacgctgtgctttcatagcttgatttaagtgagaaattccaagagcaagcactatttgatttttccataatggaatggtatttactatagttgattgaatcttttctgccatcagattattactattttgaaccaatcttatctgaggagccatttgaagcgataccattctagttaattctaagtcatgaattttcttttcaaatctgtcacaaagtgaaaccatatcatttacagattgagcatcttctgttgaaccagataaacgagctttttctctcaactttggcatttcatattctttcatatcctttaatttttgttttcctgctataatatacatagtaagctcttttgagtaagctaagttcaattcatacatcttatcaagcattgctatatctttcaatattttaacctgatgcttttgaagctctttacttactttatccacatttacctctgcactatcatacttagtttttaaatttgaaattttattatttgcctttttaaaaattcctaaaaaaccactttgttctttttcatctgctgaaaatgcttttaaatcagtaactagatttgtaagcatatctccaacttctcctaaatctcttgtttttacactctttaaagctgtttcagaaaaacttgctacctttttttgagcaccagctccatattgcaaaatcatatttgtatttgtaatatctattttttccgcaaattcctttaccatcttgcgttcagattcagacagtttttcttcttctgggtctttttcatcctttttcattaataagtcagaattatctatatcattagtgtttgattcttctccaaatgggtcaagtgtcaaagttggcataactggtatatcatctaaattattcattgtatctttctctcctcttccttcataaagtactgattaacttatataatacacattttatactttatgactaattaattgtttaaaaataacagaatattttttctattgaagttaaaatttaccactcgttaatccttcttggactaacatattctctaaaacagtaatatctgtagaaatatcaatggcttcatcttcaaacagatagtccaattgattttcaaaagctactacaatcgtattcattgtattttcaatactttccatagttgttgttatattttctctatcaattccttgttcttccaatgtatgatatgaatttaatagttttaaagtggttggaagataataatccataaatttttgtatttgagtaagttttgatgggtcatgttttacaacatcaaatattttacttgtaacatcttctacttgtacaattttatcgcccattgattctgatttaatatttttattagcttcttttatttgtgttagataattcattcctttatttataattgtatcaacttcattggattcatcagtcttttcttcttctttgacttcatatgctacatcttcatatcttggtggaataaaatcttcatttgttaacacaatctgattatttcttttatcaatataagtatttataaagtagtttttgtctatcatcttttgtacatcttttattataaaatttaatgatttagatgtgttttctgcaataagttctactggaataatatttctattgtttataattgtacaatattttttataacgagaaatttggtctcctaatctcttacctttaaaaatacaaactcctcctataagtaaaaatactgcacatacttgaataggaagtattacagcccatccaattataatggaaatagttgaaagtactaaggctgataatgtaaataagcttaccaaaccccatccaattatttttaaaaatttacttaaaaatgaatttattaatacagatttttttgaaaaattttctgatttatacatattttataatcctttcattttcactaatattattaatatattgcagtttgattatacaattacttacttattactgtcaaggaatttgaaattctacaaattgtttcaaataaagtaatagacttaaatataagcatattttaaattaaaaatatacttatatttaactccatataaaaataagagaacttaactttaattaaaatttaagttcccttatttttatttgtacataaatataattagcattgtttatgttgactatacatataaataaaaaattgtattaataaagatttgcaaatatctctcttatttcctctctactaagctctacataattattagcaagtagtcgttgttgatttgctattgtactatctgtaaattcatctatctgactttccaccattccatattctctcaaagcttttttagctattaatttatttaaaaacttttctaattctccataaacatcacagttagggtcacattcaagggcatctgctaaaatttttgtacattttataatttttccattaggtttttttctagaatacatcttaaatacttcagtaaagaactgataatttgcttcaccatgtgcaacatggaaagctccacctattgaataagatagtgcatgaactgctgcacaaccagcatttccaaaagcaattcctgcataatttgatgcaagtacaaagtctctaagatgattaaatctctcttcttctcctttatcaactatcttcttatacccatccataatcatttttattgcttgtagagaatacatctctgtaaatggacttgcttttggagaaagataagactcaatagcatgtataagagcatctaccgaacttgtaacaaagaatttgtaaggtaacccttttactgtctctggaattaacactgcatagtctgcatatgtttcttctactgcaagcccctttttagtatgtttagattttaactctgcaatagctacatttgttacttcactacctgtaccacatgttgtaggaactactactaactcttttacttttttaggtgatacttctccttcaaataaatcaatagacttttctggaacatcaagtgctaatatcttacatatatcaactattgttcctcctccaaacgcaataattctatcaaaattgtatttcttcatttcctttgtcatggagtctatcatttcatcagatggttcacctgttccaaacttttcttgaaaaattaaatttgtatctattccaagaggtttcatatatggctcatatataaactcattagtaattactaaatcattttttcctattttaaattcttcattaaattctttaaatgtatcaaaataaaatatctttggaactactctaagtgcttccattattaacacccctctattattaatatttctccttaaatctcttttcaaattctactgctagactttctcttacacttggatgagctatatttattaaatttcttgctctttctctaagagattttccttttaattctgctataccgtattctgttacaatatagtcaacatcatttcttgatgtcgttataggtgcaccttcatccacaatagatacgatttttgaaattactgtaccatctttttttgtagttattgaaggcatagctataattgcctttccatcttcccccatagacactccacgtataaagtcaacttgacctccaacaccactaaattgtctaagtcccatagcctctgcaactacctgtcccattaaatcaacttgtatagcagaatttatagaaaccatcttatgttgtttcattataattgctggatgattcacatagtctactggttttacctctactgcagggttattatttgcaaagtcatataattttttagtacccattaagaaggtaactgtcattttttctttatcaaaatttttatatttaccatttataacacctttttcataaagggccaaagtcccatctgaaatcatttctgaatgaatccctaaatcctttttatcagttaaaaataacataactgcatctggtatcccaccaatacctagctgtaaagtagaaccatcttcaattaatgaagcacaatttttaccaattgcttcttctacttctccaatctttgcaggttgtagttcaaataaaggttgtgatttttccactatatagtcaaactctgatacatggactacctcaccataggttctaggaaactggtcattcacttgaacaattactgttctagcagttttaatggcttcataagtataatcaactgatgttcctaagctacaatacccatgttcatctggtggagttacctgtgctaaaacaacatcacattttaatcttttttctctaagcaactttggtacttcatggaagaatgcaggtgtaaaatcaccatctccattttcaattgcctttcttacatttccacttacaaacattggatttactctaaaatgagcttccattcccttagcagtatatccaccactacccaagcttaccatatgtttaatctcaacatctttatattgttcagcattttcaatcatagcctctactagtgcaggaggttcacctacacaatgtgcaaatactacagtatcaccgtttttaatctgttttacagcttctgtagcactacataatttactttgatacaattcttgccaactcaatgaaatccccccatttagcttttttaagtttcacaaattgctgattcaatcacatttataactctttctatatggctaaaatcccacatcttaacacattcatttttcactttatattgttgataggatgcgcatagagttgcgcatcctccaattataagtagcaaatcatactcgacgttctcttgtgctatgctaaaatctaccctaccattgaagtgctctttgattattgtaagagccttccctctttcgtatctagggttacagcccccacaaaatctaactccacaggtcatgtgtaaattctccttattaaaaatttctttacttagctaaaaaccaccataattttataactatctcttatactacatatcttttcattaattaatacacattaatatataatttccctttatatatcaactttttataaatttaaagcttcctctttttttattcccgcaattttcttagctaattctttcttttgatttatgtttccttgtcttgaaatcattattctttgagcttgtggtgaacctgccccatgcattgactcagttctataaccaacagcagatgaaccaagacatatattttctaagaatcttaatattctcattctttcttctgttgaagccactgaagaagctttaaaatacttgttacatacttcgccaatagtcattccacttgttccaactttaaggtctgatttaaagtctttttctgaaggcatagtaaccataagccctccagctatatcttctgcaagtcttactatttcataaggaaatctagttacattttgtttacacacatttgcaagaagtaaatctatttgatagtttccagcttctgttttgtgaccttctgatgaacatgctataccacagcaatataagctttcattaaggtgagtcatttctattagtttatcttttatatgtgaagctttgtttgctccattataatcagctgctaaagctgctgctcctattattacatcacctactcctactttacatccaccataactttgtctatggtatcctgcaaatctctctactaacataccagagaaatcccattctccacataagaaaattctatcatttggaacaaatacattatcaaatactactaaagcttcttgacctccaaactccttatttcctaaatcaacatctgcaccttcttctaattttctggtgtcacaagattgtcttccataaatcataaacacaccttcagcatctgaaggaactgcaaatgatacagcgtagtctttatctgcttcagtcatacttatagtaggcattataaggtgctcatgtgaatttattgaaccagtttgatgtgcctttgctcctcttacaattatcccatcttctcttctttctactatatgaaggaacatatctgggtcaggttgagcactaggtgatagacttctatctcccttagggtcagtcatagctccatcaactactaaatcgttttcttgtatataagttaagtattttacaaaattatcatgataattagttccatgggctttatcacactcaaatgttgttgaatacactgcattaaacgcatccataccaacacatctttggaaacaagaagctgttttttgaccacatagtctttgcatttttactttttttatcaaatcatcaacactttgatgaagatgaccaaatctatttattttttcacctgtgatatttgaagtaactgtcattaaatctgcatattctgggtcatgagctaagtcataagttgctgctacacaatttatagatggtctaatcataggatggtcaacccaattcttaacctcttcaccaaacatataaaccttagtatttaattttctcaaactttcaatatattgagctcctgtcattaatgccataataaaaccactccttctcttttatagatttttttatttattttaaattataatacttccttcttctatatgtctcttaatattttaaatttagtccaataaactaatttaaatttaatttatgtcttaaattcattctaaattaaaatatattcctactttaatttagaatgaatattttttgtctaagttttatccccaaagttcttcatctgtagggacttcattttctggcatataataagcaattctagaaatattaattagatgcttataatcaagattttcagagatgctgttatttccccaagaaccacaacctagagtattagtaggtgcaagaccattaaagaaacttcctccagcactagtagcacaacattgattaataacaaatcttgatacttctatattttctcctgcatattctatatttttaactgtatttgaatgtatagatacactatgtccttttccttctacatttaaatttgcttttgcaatagctacaccttcttcaaaacttttatacttgtatgcagatataactggacacattttttcttttgcaataatatcctcttctcctggtccatcagcttctattactattatttttgtatcttctggtatctcaacacctgcaatttttgcaattgtatgaactgattgacctactgcatctttattcatagatttatttacaaacatagcatttctgaaagcttctttttgtactttatctctaactataaaacctttgttatttttaaattcatccattattttatcaaacatttcttctgctactattactgactgttcacctgaacaaatgataccattatcaaaaattcttcctgctatgattttaggtactgcttctttaatgtctacatctctatctatgatacattgaacatttcctgcccctacaccaagtgctggttttccacttgagtacgcagcttttaccattcccattcctccagtggcaattactacatctgctgatgaaattaaatttcttgtattttctcttgattgttggtcaagtatttgtattaaattttctggagctcctattttttctaattcttcattaatcatctctacagtttttgtactacatccaattgctttatgatgaggtgtgataataattgcatttcttcccttaagtgcaaacattgcattgctcataggtgtaacgattggatttgtacaaggagttattgccgctactactccaactggtttagctacctttgttattccagtttctctatctatatcaattataccaactgattttttatcttttaaattgttatatataacttttgctttgcttttatttttagctaccttatcttcatatactcccattccagtctcttctacagcaagtttagctaaatattcagcattataatacactacttttccaactatttttactattttatctacttgttcttgagtataacattcaaactctctttgagcttttcttgctctctcaatataaccattaatgtattccttacttaaatcttcaaagttttccactgctttttccatttaaaatctacctccaatttattaaatattttataatgcacttttaaaagtttcagcctttttcattgtacctgtactcataaatttactatgccatgataaagcttcgtccaatatgtgaggtgtttgttttgctccacttttacaagctctatttaaataatccctaagttgttctttataatctggatgggcacaattttctattatttttatagctctttctctaggtgcaagacctcttaaatcagcatatccttgttctgttacaattaccattacatcatgttcagtgtggtctacgtgagataccataggtactattgatgatatatcaccattttttgcaatcgactcagtactaaatatagttattgctccatttctagcaaaatcaccagaacctccaattccattcatcatctttgaccccattatgtgagtagaatttacatttccataaatatcaacttcaattgcagtgttcattgcaattacaccaattcttctggctatttctggattgttactaatttcttgaggtcttaatataatcttatccttaaaaaaatcaatatctttttcaaattttattaatccttctggagatggacttacagatgtagtagatgccattgtaactttacccattcttattaaatccaacatagagtcctgtacaacctctgtataacaagttaaattttcaaattcagattcacataatccatataatactgcatttgctacacttcctacaccagattgaagaggaagtaaattctttgataatctgcctgcctttacttcttctcttaaaaaagcaataatattatttgatatttttttcgaagcttcatctacaacccccaatggacgggtcttatcttgcatattggtaattactactcctgcaattttatccaaaccacaaggtatatatgttgttccaattctatccttaggatgatttatttctattggttttctatttggtggattttccgtaatatatatatctgccataccttccatttccattggttttgcaagatttatctctactattactttatctgcactttttataaaagatggagaattacctatcccactagttggtataatattcccttcttcagttattgcaagtgcttctactatagctacatctactttaggtatagttccataatttaaaaattgagtagaatgacttaggtgcatatctatataatcaacaacacctttattaatattatttctaagtattgaattagtttgataaggaagtcttctttcaattatacctgcttctgaccatgctccatcaacttctgggcctaaagatgctcctgaatatacggttaattttatcttttctccacttttagctctttctgaaactgctaatggtactgcttttggatagcctgaaggtgtaaatccactaactccaataaccatgccatcctctataattttagcagcttcatctgcattcattattaaatcacacaattctttatttcttaatcttccacttaattcttcaaatgctccttcattattcataaatatccccccatataaaatcttatttacattggaagtttgtgtaaaactataaccaatataactttagttaataatgcaaatggatacgtagcaccataacctgctgctgggtcatcactatcaagagcatcaacagcagctccaagacctggtgttgatgtcataccaccacagacagctccagataataaaatccaatttaatttaaatacgtatttgccaactaagaatcctatcatcatagctgtaacacctactgctattgctactaaggctaggtgcataccagatgtcataattgaatcaactacttttccaccatatcttaatccaactattgctaagaaaaatactagccctatttgttttaaaatatttaaaaccttttcttccattctgaaatttactacccctatcttacctatatatccaagaactagagatacaattagtgaacctcctgttgcgcctagtgtgaagtaccctagtggtcccataaatacatgtattcctccaactaagtatccagctaaacatgtcaagaaaaatgttattatattaaatggaacttctggtatcgttttaccagaaacactatctcttgcttccttcatttccttctcatattttcttctttcttcttttaggtccatcctaaataattttggaaggaaatttacacctaagattactattaaaactccaaaaggatatgcgactgcatgacctataccaacaccagcttcagcatatgcaatatacttatctatttgctcttgagtcagtgatgtagttgtattcacatccaatttgccttctgggtcgactacttttaaaatttcttttttatcttttattgaagctttttcaaattcttttgatacatcttctgcatgtttaccagctgtttctaaagcagcagctaatccaggcgaacttgttaatgctcctgtgtaaacgccagaaacttcataagcactacttcctttatcacttgatagtaaagtcattgcataagtcatagagccacctataaaagttataagaactcctaaaattacaaatcttgctccatacttctttaatacagctttcatatcttttgctgccaatagaccaactgctgcaacaaatattattaaaaagaaatcaaagaagtcagaagaaataattccattccccatcattacagttgctgccttatatcctgctgctgtttctccttttgctattattagattccccaagctatatgcaagccatccaataaataatcctgtaaataatgctcctgataccccaaaattaaacttcccaaatttaatttttccaaataaaattcctgtaattactgcagcaaacataaggacaaaaggattcattaaaaaatccatcaattcaaacttcactaaatcactccctttcatttttcgttattaaattaacaaatattattaaaaaatatatttctcctttctccccaatactctattttgttattaaattaacatttctgattaaaaaaattttatcttgttaatatcacttttttctttatgatttaattaacaatttaattgtaaaaataatttttattttctaatagataattttttgatattcgttgatataactgtaatatagattgatttactctaaaccataccagctattctcttttgttaatttaataatagcactattcttaatagattgaaaatatcaaaaacttatgctatgatagtttaaaactattctatttttttacaacaatatacaaaacttatgctattgttaattatatacttgtcactaatatgtaaatgaaaggaactaataccaaatgaatataaactatttatactattttcaaactgtctgtaaatataaaaacatgactaaggctgcggaaagtattcatatttctcaaccatccataacattagcaattaaagaattagaaaaagaacttggctttgaacttttttacagaataggtaataaaatagaattaacgcctgaaggaaaaatttttttagacaagtcaaaacattttataaaacaatttgaggattttcaatgtgacgcacttgatttaggaaaaaagagaaaagcttctctcaaaataggtattcctacagttttaggtacgtttttgctttcaaaaatacttcctagatttaatgtaatttatccagatatagagcttaaaatttttgaagttccaacatttgttggagctaaaatgattgaagaatctacacttgatttttgtattggtataattgacagtgatatttatgatgatatagattcaaagacaatctataaaacagaattgtacttagttacaaatcccaaaaatgaattggcaaaacatcccattatatcaaattatatgttaaaaaatgtaccttttgtaatcttatctgaaggttcttatcactataagattattacaaaaagacttgaaaaagctaagccaaatataattttacactcaaatcaactttctaccatacgttatttactagaaaatgacttggcttcaacaatattgtataaagaaatatttcaaaatacagaaaatctctgttcaataccattagaacgtgcaattactgcaaatattggagttctttggagaagaaatcaatacatatctcatagtatgaaactttttattgagtatatggcatctattcatataaactaaatttatattatacagatataatattttgtttaaatacaatgttaaaatattttaataaatagtatagtttagagtatcagtataaaaatacaatatagaatgttatagaattataattgtatacatttaaatctaaatattattatactgatactttttaaaataccttttattgataatacttttttaatcaggtttacttggacaacctagcaaaaaacccacgcatcctgagacaaaatctctcatctgtgaaatagtacctaaagaagctgatgttgtagttgtaaaatttcttacaacaaaaagtactgttaatgctgctatacaaattacagtagctataataatttgcaattcactagtttctccttcttcaaaaccttcattattattaataggtattttcttttcataattatcagcttctgaagtaaatccaatggtatttttgacattcattatattattttgactagactcttgaccttttgggggtaaattattatctataaaaagatttgaagatacatcagtatttgtatacttccttaaaggtctctttataaaattagcacttaaaaaatacccaaatatagctgctgaagtggttcttactactacatcaatagttgtagtatcttgtgaatttacttcattaacaaataaattatatatagattgaaacattaatattgccattacaattataaggcatctatcaattaatttgattttataccaggctttttttatattttttataaatttatgttttttatacatatatactatcacctcttacaataaaattaagccctctttactataatatgtaaatagagcttaatagtgagattatgttatattttatgtaaaaaaatatatataaattaaattatttgtctaaaatcatcaaatctttagggaatttagtaagtctttctggaccatttttagtaatcaaaacagtatcttctattctaactccaccccatccagggaaataaatacctggttccattgttattatacatccctcttctatgattttatcaccataattaccaatgaaaggttcttcatgaacatccctaccgactccatgtcctataccttgatagtaatagtcttcatattttttgacaacttttcttatctcagcatctggaattgtcgcatgtacaccagctttcatgttctcaacccctacattttgagcttccttaactaaattatatatttctaattgcttttcagaagctcctccaactataaaagttctagttgtatcagatatatagccattatacatagcaccatagtctataagtacaaaatcacctttttctataatcttatcactaggcttaccatgaagcaatgaagtctttgctcctgatatcagtatagtttcaaaccctatattttgtgctccgttcattttcataaagtactctaactttgtagccagttcaatttcgctaactccagcttttatatgtggaatcaattcttctaatgccttatccgctatttcacaagcttttcttgtatttttgatttcatctttgtcttttacatatctcaaagtctctacaatattttctgtaggtattaattctccattatccttctcaatcagatttttaagttcttcatatttatcaaacactatattagttctttcaaacccaagtttctttatacccactttatcacatacacttttaactgcctttgccacacttctatcaaaattatgccaatttataatttcaaaatctttgcaaaccttttctgcaagctccatatatctactatcagtaactaaaaagtttccatctttgcaaatcactgcatatgcttcttcatcaggaaaaccacttatatagtttacattagttttctttgttagatatagtgcatcaacacctttagttcccaacaatcctactacattttttactctgctcatgattttacctccaaataataaattttatcttaattatattatatcactaattaatcttatttttatctaacagatactttattcctaaaattttttcatattttattaatttcattttaatacttcattagtttttatttagttagaaagcttaattttaattgaataaatataataaattagctagagaatcaaataaatggattgtgttaatatataaatattgacaagatataaaataaaaagaacatataattataatcaataaaattataactatatgttcttatttacatataaaaaatgtacttattttgcagtatatccagctttaactaaagtttcaactgctaagtctcctttagcttcatttactaaaactattggacctgtacaacccataccactttcagcatagattccgtttttccataactcagatactgcatcttctaaatccattatatcaacaccagctatttgacgagtaacaatttctttatctggcattttaacttctactttttcagctttaacttcttttttagtaagagaggatataatgtcatcaaattttgcttttttaacctttgcaaattcatttcttgcaacattacttatatctccctttacaacatcataagcgtattttaaagcatttgctactaccggagaacctgatgctcttgatactataagtacctttctatcatagtcttctccaactccaggtccgtatccaaagccttgagcttcataatctccacctgtagtatatgaagaaaatactttcataaatatatttccagataatgtatcagtaaccataacatcaggtgcacctacaagtaaatcattacctctcattacacatccaccatctgctctaattgaatccgcaaactccatgtcatatccattatcttttaattcttttaagcacttctcaacttgtcttgctccatcaacattaagtattccaacttttgggcatttgttacccattgatttagctgtagcaataccataaatggcatttcttaccattgcctctattctattagtagcacttgttcctgttgttgttgcaagtatcatttcttttccttttgctggagttattactctacctactgtagatacacctattggaaaattataatgcatagtaacacaagcatcaatatatcctgaatctaataattcttccatttttgcatgcatttctttttcatcattaacttcaactacttcaaggtcagtttccacttttggtccaataagcacaatatcaaataaattagattttgctaattgtgcaccattaaccatgttttctacaccatgttcacttccaagtgtagtaacaccaatttttacttttttgccaaattcgccgctttctattgcattagctacttctaagaatacatctgcgattactttttttgacatatcctcacccctattcttctaacatatctaatgctagttttttcatagattcagctattatcttcttaatttcatccttagatattcctgaagtctcttcagtaacacctgtatttctttcagctataaaagatactccatcaaataagttagtcattcttcctaagaataaactaccttttccaactatcatagctctatttctatttcctgtagttaaatcatctattaaaaatcctatataaggagctcctgatggtatatgtccttgagttggtgcccatcctggtaatcctttgttagaaacaaaatctttcaattctttcttttctaagtctccacgtttaacagcaagtgcccctatcattttgtagtttgcttctggaacatctcctgctcctgctggcttagttatatctgggttttgcatttcaactgaatacacatcaacatctgttatttttaaattagctctatcaagacctgaagttataagtgctgtcataactgcttgtggtgaagaaccagttccaacagtatgcttacctgttaaatcagttcttataactggatttacaccatcattttcagatacaagtactgcaaatcctccaacaacatcttcaagtacaggaagaccttttttaacatggtctttagcattcattccaagtttagcacttgctccacctgctactaccattacatttttatgtatgccagcttttactaaagctgctgcttgaattaatgcatgagttggtgctgcacaaaatcctcttgtgtcagaaccagttgcattctgaagtcctgctatctcagctattgatttagcaaagtttcctccacctctttggtttatatctccacaagcttcttctgaacactcaataacataatctatttcagcagggtctattttgctatgtcttagcatttgaatagcagataaaactccagatgcttttactactagattttcaaacattgtatgggcatttaagttaacatctacatcatgtgctctttttacataaccaacaaattttccatcatggtataatccttcagctatgtgtgttgctactaattctttaccttcttctatatcatcaccctttaatttacctacaaatggtgcaatttcagggtagttattttcgatttttggctttacttcatcaataaattcttgtgataattttactaaatcaaatgcatcacttatttgcattaaagctatgaactcatcttgaggcattatttctccaaacttaccatttctagttccctcaatcttttgttcacaccatggcattggtaaatctcttaattcttctggtcttctatttcctatataaacttgatttggcatgtagttaactacatcttcataacttcttatatgattacttacttcttttaaaaattctgaatctgaatttgttgctctttcaactgtacaagtacttccattttgcactatcatatctggagtatgaataagtacatagcctgccccttttaaaactggataagtcattttgtgcacctccataaattttatgaacacttattttttaatcttattaaacttattaaaagctctaatcattgtattttattgtatatttgattctattattgtttatgtattttggcattttttaagatttcatgaatgaataactccaatttatccattcatgaaatctatattattttttttgtgtatagttattttttatttttagtgtgtgtttatatttttatctatataatatatgtgtgtgttatttttatttttcaaatactgtttgaccatctacttctgtagttaaagcatttaatgctttttctacaaggcctcttcttagggctttttcttctgtagggtcaagcgctggatttccaagtggatgaggtattgctatagttggaactattctattagcccctactgttaatgaaataggtactactgtacacatatgaactactggaagtccagttttttctatttcttttaccatcgttgcaccgcaacgagtacaagtacctcatgtagaagttaatattactgcatctacaccatcagccactaatgctgctccaatttcagaagcatattttttagagtttgcaacagatgtaccattacctacagttgtatagaaagtctcatgtaattttccaattacaccttctttttctaaatctctaagaacatcaacaggtaatactctatctgcatctaaatttgcatacactgggtcatatccaccatgtgcagtttcataagtctcttctgttaaatccataactcctgctatagaataagttccatatttagaagctgaagaagactctattctatctggatttccttttggaactataccaccagaagtaactaaagctattttacattttgataaatcttttacagctttacttgggtcaactctatcaaagtttggcattgggtattcagtttcaaatggttcaccttttattttcttaactaacatgtcaacagctctcttagaacctctgtcttcatggaagtagttaactcttattcctctagctatgtatccttcatctttaggagttccaatttcttctccattagcaagttttactgcaagtttagctatcttaggaagtgcctttctcatacctgctgcagaatcagaagtttctactacataaacatcctttttgaacatatctgctcctggattttcaacatacatacctgttaaagctggtatattcaaagcatcttttacaactttagttattgttccagcagcaaccccatatctaccagcattaaatgcaggaccagctatgaaaagttgtggttcaaaaccttttaccattgataaaacttcttcacttgcactatcaatattttcattgaaatagctatctccacaaactactgttccaactatttcaatatcttcacctaataatttatcaagttgtaaacttattggaggtaaagtttctgccacatgtggcttagtatcagctttttcttctccacctataccagcaaagaactgattaatataatgtactgcttttagttttcccatctcttagtttcaccccttttgcttttaggcattaaaatttacaaaattcttctcttataccagacatttcttcttctatttcttcaacttctaaaaccatttccatcatacttatttggtcttcatatacactttcatcaaataatgattttattggttcctcaacaacgtggtaaacacttaatcctaaggcaactccagcaagtggtccagcgaaagttggatctccagcagttactgtttcggctgcaagacctgcagcttcggcttcagcagcacctagtaaaatcacaacattttcagctccgaatttatcagcagcatctttaactctgttttgattttctaagtccatagccccagcagctgttcagacaaagcattctgtagatgagaaaacaacctctgctccttctactgtttttacacattcttctatcgcaggtcctggtataccatcacggtcacctattataagaacctttttattactaagtaaactcataataatcctccttattatatttctaatatatttttatatatctataacacttattataattatctataatatgttttattaacattactcaatcgtttaataaaatacttcttaatatcctttagcagttaaatgaccaaatcctgtttcattagttgcacctgttatagcttggatttcaacttcaatagttccatcagctcttaaacttccatcagaaccaccagctattacatctactacttctaaatgtccaataactttatctaacttaggaagaactacaacttggttggcatttccacctgttacaacagcatcagctcttacatctgcatctgcaagtgattgagaacctccatcacgtccagcatattcatctgtaactataactgttttaacaccttgcatttctatcttcttacagttcattataaggtcagtatcaggatttccaaaaccttcttgtgaaactataactgcatctaatcctaaatatttacataatttagaagtccagtttgaagatctttctttatctgctaggtaaacattttcattagttataattacacctacaaagtttatatctttaccatgtcgtgcatataagtcttcaacaaccccattgtttatatgaacataacttgggtttttgtcacatgcagaaacacagttaccacttacaattgctccgtccattaattctgttggatataataaagttggtactatttgttttgcatctactccatatacataagtatcatgtaataaaccttgagtctgaagcatgtaaacatatcctacttttggaagctctggatattcttttattgattcaagaagaggtttagtttcatatactgaaacttcatctggagtaagatttcttgctacttctcctaagtacattgctgctttgaatcctatcattctaacagctttttcatgagcgtattgttttaaaccatcaataggttcagctattactactacattatttaatttagaaaatggagtatacttagctccttctccagtcatgtctattataccttcttggaaacctactatttttccagtagttacaacagctacaccttttaaagcatgagtttttccttctcctacagtatcaactttagacatgataccagggaagattcccccattaccttcaacttttactcttggctcaataacatcttttacaggtgttattcttacgctttcacctggacgagctaattctatatctatagatttaatatgctcatctccaccaatttcttgtagcatctcttgcttattgatgaataatactccatcttttacttctgttacatcaccaaattgaatatcttttataaagattttccctaattcaagacgcatacttgcacctcctgttatttaatttgtgtatatgcatttgagtttttctcaaaattatatcattttacaatttatcttatttttttaaagatatattattgtgtttttatgccttaaatctttattttattactaaaaaatatttattgtaaaaaaattattttatttaaaattatttttttaacaaagttggacataaaaacctttttcttcttatcttcagataaaaatagattttttcttttaatgttaatactttatcaacatattaaagatattttttaatcatgttttctatattaggaactgtagcatcatccttagtaacttcgtctactttttctccatctttgtatatagccatagttggaagacctaatactttttgttttatagctaatcttctagcttttgttgtatccatcttacagaattttattttatccccataagtctcagctaatttatgaacatctggcattaaagctttacaaggctcacaaccttcactccaaaaatcaacaaatacaaaaccttctgcatttaaaacttcttcttcaaatgtagccttatctaaatctaacattttcttattcccccttgaaatttttattttaattttaaatattattcattaaatttacagacactatttcttaatttacagattctagttcccaaatttttcatcaatgtatttctcagctactatagatgcaattgcgccatcattagttgcagttacaacctgtcttagagtcttagatctacaatctcctgctgcaaatacgcctggtatgttagttctcatatcttcatcagttattatgtaacctttttcatccatatcaactttacctttgaataaatcagtttgagcatctaatccaacgaacacaaatactcccattgttccatcttcttcatctgcaaagtattcatgagtttctccagtaactttatttttaaatacaactgattctaatattccatcacctttgatttcttcaattactgtatctaataaaaactctatctttggattagcttttgctttttcttcaacactcttagcacatctaaatccttgtcttctatgtacaattgttacttttctagcaaatttagttaaatacattgcttcttctaatgcactgtctcctccacctacaacaaatacttcaaaatcttcaaagaaatctgcatcacaagttgcacaatatgaaacccctttaccagtaagttctttttctccaggacaaccaatctttcttggtgttgctcctgttcctattattactgcttttgctctatattctgccttttccccttttaaaacttttatatctccatctagctcagtatcaacaatgttatctcttagcatttctgctccaaactctttacactgttcaaccattctagctattaaacttggtcctgttgcatttggaactgaccctggataatttgcaatttcatgtgttattacaatttgtccaccagtcttgtctttttctaggattagagtttttaactttgctcttgctccataaagacctgctgcaagcccagctggtcctgaaccaattattactaagtcatacacattttccattttgacttatcctccccaattaaatttctcattttatttaatattaaattagatttaatatttaggctgtttcaataactttttaacaaatttttttattcatactgcattctttgtattgtattataaaatatatcataatcaattactctaaaatcgtcttggacattttctgtccattttggagtctttttattatcctgaaatttacttgcagtgatgattgcttcttcaattaaggttaaagagtttatatccaaacgatttcctttctttagtataacagtcctgtaaggtgtttcatttggttttacactcccatagagtggatgagataaaagttcataaccttcatgtatcaaatctctacttgcttctaagattccaatataagttgtgtctttaaacaaaacttctctgccttgaacttcttcttttacttttggattattcgtaattattatcatttttttactctctttcaaacttttatttattacttgataaataaaaaacaggaaaaacaaatctcccaatttgtcttccctgttaaaatcattttcagagccccgtccaagtacagtcacctttacctgagaatttcatctaatcttttgggtaagtaagattaaacttgtcccttcggtcgctttttataaagcagtctcccatactcttcatccggattattatttttttcagaaaatttaaaattaagcaatttatcctttgttttctataaatagcttttttctatctctgttgacttaagtatataaacattctataaaatttgcaatagtttttttatatgtattttgtatacatttttacttttttttccaaatgttgatattgcatatttcttgtattttcttttttttttaagtacaaatcttttttagtttattttatcaatttagttaaaaacaagactattttcacaacaaataatcactttttatatattttttaatttttcacttttatacaataaaattctcataattttttataatttgctgtcatttatttcatcaaaccaagatttaacatcacctataatagactcaatacagccatcatcaaatggagaatacaaatttcccatactcacaatatctaaaaatgattttgttcctccaactttacagatatttatataatctttccatcctgcatctctatcttgaatcatttttttccaaaattgtaacgcacaaatttgagctaatacataatctatataataaaacggatttttaaatatatgtccttgtttaaaccaccaacaacctctctctaaaaaagaattatcaccatattttctatgaggtaagtattttttctctaaaaatctccagatttcttttcgttttgacttatctacattaggatttttgtaaatatagtgttgaaattcatcaacaattactccataaggtataaatttaattgaagatgataagtgagtgaatttgtacttatctgtatcttctttaaaaaataaatccatccacggccatgttataaattccatactcattgaatggatttcacaactatcaagcgttggaaaattaatttctggcatatcaatccatctagacatatacaactgaaatgcatgtcctgcctcatgtgttaacacatctatatcatcagcagtttgattaaaattagaaaaaatgaatggtgacttataatctggtatataagtacaataccctccagctccttttccttttttcgtttctaaatccataagttcattttctaacataaaatcaaaaaattcatttgtttcttttgacagttcagaatacatccttttaccattttgaattatgtatcttgaatctccctttaaacttgcatttcctgttaaaaattccacgccttcatctatgtaacttaaatattctagaccaattcttttagcttgtttttcataaagctcattggccattggaacaacatattttaatacttgttttctaacattttttatcatatcttctctgtagtcacttctcatcattctaacgtacccaagctctacaaaatcttcaaaacctagttttttagatatcttatctctaagtttaaccaatttatcaaatatgtcatcaaatttagtttcattttcttcaaagaaattataatatgctttgtttgctaattctcttgtttttctattcttagaatacatgaatttccccataccagataaatttcttatattcccatcaaacattatctcagctgaagctaaaagtctagtatactctgaacacaatttattttcttcctgcaattcacttattatttctttagaaaaactttttaaagaatactctactattgtgaaaaattgttctccaaactcttttatcaaatcatatttaaattttgaatttacaatagcattataaaaatgtgaatttaattcttcatacaaaggcatatattcatcccaataatttttttcttctttgtagaatttattaaatgtgtctgtactatatcttatcgaagctatatttgacaacgtttctattttatttcttaataaattaatcttatgtatatttttttgttgctctttataattacgagaattatttatatcttctacacaactcaaaaactcttttttcatactattataattgggtctttcatacttaaactctgaaaacttcatttaaagcactcctttacaactttactttattgtatttataaatatagatttacatgtactatgtaatacttttttataaattattatatatattaaatattctttatattataatcatgttgaataataacatatgattaatggaattacaatattttataacacaaaactaactaatataacaaattaccatcagtctatttattcaaacttctaactatataatatacatttatttatattaacaatgcaaacgataccattatttgtaattaagaattttggaattattgattacaaagtttttacattctcatctcacataagtaatatttttatcaaaaattaatattattaaactttctaaattacttatctcttgatataatagtatacaaaacaaaccatatttcccactgaaactttgttcaacactagctgtgtcaacgttttcacaggaaatttgagtatataatttattggaggttgatatgtacaaattaatcgcactagacattgatggaacaatattaaatacacaaaaaaggattactcctgaagtctttgagtccattcaggaggcaaaaagggctggggcaaaagtagttataacaacaggcagacctcttcctggtgtaaaagaacttctaaatcaactaaatttaacagatgaaggtgattatgttatatgctttaatggagcaattattcaagaagttaaaagtgagaaaatcatacatgatgtagaaatgactttagatgattttgattttatatataataacgtttgtaaaaaatataagactaaaatacacataaatacaatgacaaatttaattacaccaaatgaagcacctggaaaatatacacttcatgaagcgaaattaaataatatagaagtcaaatatatacaaaaagataaaattgatgaatctattaaaatctgtaaaattatgatagttgatgaaccagaaagattggaagaaatcatacagcaactacctaaaaatttattcaataaatatactatagtaaggtctgctcctttttatctagaatttttaggtaaaactactaataaaggaactgctcttaaaacattatgtacgaatctaaatatacctatagaaaatgctattgctgttggcgatgaagaaaatgaccaacatatgataaagtatgcaggtcttggtgtggctatggggaatgcacgtaatagtataaaggaaattgcagattatgttactgatactaataatgaaaatggagttgcaaaggttataaataaatatatacttaataaggctatctaatcatctaaaaaaactaaaaatatacctttagatttaaatacttttcacatccctactctatactaatttatatagtatggatattacctatcatttttatctaaaggtcatttttagtttttcatatatgtatatctatgatagtaccttttgtttgagtttaaatattttatatgattctactattgcctcattaatatctaaacaatatatatcttcatcatcagataatcccgcttcgtttgtccaagcatcaaaatcactcttcgtccagaagaaattcattatatttcagcaactagcagcccaatttagatgcttatcaagatttatatgaagcactcttaagtttggattattcacatactcaatcttttcattttttataattacttctatttccttacctgtagcactacaaatagagtttatttttatatcttggttgaatgtgcaagaggttcctatagcatctatagcacacattgcgctgaaacttctattatctctcaaagttactttatgatttgtttgcaatgctgatacaggatatataaaatttatactattcccatcaacaaccattatattttcataaataaaatattgtagtgtcctttctatatattctttttctatattcaactttttacttacatattcagtcacttcttgaagtgtaacactagaacctttatctattatcatatccataatagagattcttattttctgttgtgtattatccaaactattgtatttttctatttgactcatgtctactcctctttaaacttcataacactttgataaagtatcagttaatttgtttttgtactcttcatatttttggcttcctctaattctaggtcttggaatatctatatttatatcatcaataattcttcctttatctctcgacattactataactctatcactcatatatacagcttcatcaacatcatgagttaccattaatgcagttattttcttctttatccatattcgttctagctcttcctgtaaattttgtctcatttgaaaatctacagctcctaatggttcatccattagtaatacctctggattacatgctaaagctcttatcatggccactctttgtttcattcctccagataattgatgcggaaacagtttttcttttcctttcaagtctgacataaccaaaagttcttctagcatttcttctcttttttcttttggtattttctgctgtttcataggaaatagaacattacctcttatagttttccaaggaaataaagcataattttgaaatataaaagctctatctatgcccggttttttaactcttttatcatttataaaaacatctccacgttctgatttttgaaacccacctattatagtaagtaaagttgtttttccacaacctgatggtcctaaaagacagacaaattgtccatcatctatatccatacttatatcttctaaaacctttgtatgtactctattatttacaaatgtcttatttatatctcttacacttaacttcattaatctgcaaacctccatctacaaaggattttatttataaactttaataccctatctattataaatcctattaaagctgcaaatatcataagcccaattaatacatctgtatgcattaatgtttgagcttgtaccattgagtaaccgagaccggcactcgtagctataaactcggctcagataacagacatccatcctgtacttatagcaatccttgaaccagttagtatatctggaagagatgcgggaacaattacatttgtaaatatcacaattggcgatgctcccatacttctagctgcattataataatcctttgatattgctcttactccttgaatagtatttaaaattatagggaaaacccctgaaaaagctattaaaaatattgttggaccatctcctataccaaaccatactatagtaagaggaacccatgccattattggaacttgccttacagaatctactactggagataaaaccctttcaaaagttttagaaaatcccataataaatcctattggaagcccaaacaataatgcatacataaaacctttaagtactctctgcaatgttataaaaagattagtgactgtctctgcatctgtcacacagaaaaagaaaccttttattacatctactggcattggaagtaacaaagaactccctatatcttttgctgcaaaatgccagactaaaaatataataactaatagtattattttatataaaatatccatactaccatcagtttttttcttagttaatctatcgcttttatctttagaaattttaatttccaattgcttatttcctccatatctatatttcttatattcctgtactcttttaatgctttcttaaatgtagctttattctttaaagcatcaacacttttattgtaaagtgttataaaatcactatatgctttactttttttaaactctttacttacaactaatacataggtatcataatctcctaatttagttgtagattttcttttaccctctaacccaattgactttatgcaatctattacaacaccatctactaaattactttctaatccatatgctagtgcagtccctaataatggagctacttccacattcttgtagtattttttaaccaattctgactggtaatctctattttgaatgactcctatcttttcaggattattatcacttaatagaaatatatcagaattttgaactacagtaccaacaatttcaaatccactatttacatttacatattgttttgcagcatctttacatatgattgctatatctatttcctctgaactcagagcccactgcattgtacttgctcagcaatcattaattgtaaaaatatccattatatcacttacttttatattttcaaagtagtctctatttaccatataatttattacaaaaccagaggtatcatcagatacccctattcttaattttccttttatttcttctttatcttcaaaattaaaaaatattataaatatacttcccaaaataatgataaaaagtattattatattttttatattctccatttatttataatacctttgctttccagtcttcataactcataccttcaggaaactctgggttaactttttcttttataaatttgtcaaaatcatcagctccacaagagtccaataagcttgtatcaatcgtatcttcatatttaggtatatcatctaaagcctttaaatctttatacatttgtaaattatttttatattcttcacctgtaactttccaagtaagagttctaccttctccaacagtcttcttatagatagttctaagtgcaacttcttcttctacattataatattttgcaaatattttagctgcttcagctggatttgtatatatatattctattgcttttgtatgtgctagaaccaatttttttgctaaatctggatgttcttttataaagtttttgtttaatgagaatgaacaacagttatattctttgccattagctttttctttatattgagtagatgctattatttttcctgcaccgtcattttcagctacagaaccccaagggtcacaagatgtaaaagcttgaattttcccagttttaagagctaaatatttatctttgtctgaatccatatttacaacttcatattttgatgggtcagttggtagacctgtttctggaccataatcacttgtccataagaaatcactcatatctgttgcaatttttttacctattaaatctttaggttcttttatatcttttgaaactattaaatattcagaaccaccagtatggttgttagctgctattgttattggtgaacccttaggtattgctccaactaaccccttagttcctatgtaacctgcatccatttttcctgctgccatagcttcaggaactttaccatttccaacagtttttacattaagacctaaatctttatatattcctgccgattctgctactggtcccgcagtcatatggtcacaattataataacctactgttattgtataatcatcttttccagcttttgcttcttctttttcttttggtttactactacatcctgttaatatagatgtacccattacaccaaataagattagtgcttgaatcttcttagataatttcatataaatttcccacctttatgtattatttttatttttagcaacatttgtccatatcttcgccaaataaatcaacaaattttttaccctctactctgtaaatagcatatcctacattaccatttttagaccctgatactattacttctattggtgctttatcatcaatatttttaaaggttatagtttgattctctataggtgctggtattggctttgttatatagtggctatttttatcagaaactacgactaccatttcatttgaattattgctttttttatatataactactaaatcttttttcccatcattatttaaatcttcttcagcacaagttattatgtcttctttataattttttctaaaatattctaatgtttctttattcacatttggaatagaagcatcttctttgatgttatcatcaactatttttgataaaatgattaacacaactactatacaggatattataactatctttttaagcatgatttcctatgacctctttcatctttggtattgttgatttaaatgcaaataaaataattaaaatagtacatacatactcaaaactatcaggtatatttaacattagtttatttgccaactgtattgaagaatttgttgcatctaaatttactgaattattattcactaaaagtaaatttgttatatatccaattattattgaggacagtgtcaaagttacagaatatataataacagttctttttccaataagtttaaacatgcttataagttctggtagatttgtagctgctccagctattagaaatgttatcgctataccaggagatgctccacttgcaacaagggctgctataaacggtatatgtcctacagcacatacatacataacacatgcaagtattgctatacttccaagagatagcaaacctggatttcctaaatatttttgaattatactatttggaaaaatagttgttataaatcctgcaaaaaccatacccattactacatatttactaatagtaagggctaattcaccaaaagaccatttaagaccatcaatcatattttccataaaacttcttttttcttcttctaattctattacttcttcctctgaatcattataaagtgataattcttcttttccaaaacaatttcctaaaaatcctactaaaaatggtactaaaaaaccagctattagataaatgattgtaactttaggacctaaaagacctagacaaagaactacagctattggatttattattggagttgatgtcataaaagcaagtactggtcctaaatatgctcctgaataatacatacttattccaagtggtattactccacaactacatattggtaaaaacattcctgagatagtacttttaattaaagaagaaaatttcttatttccaagttgtttttgaaaccttcttggagttaaaacattgtgaagtacacctgccaatataaaacttatcataagccatcctgatgctccattcagtgtaactatagaagctactatagtatctttaactccatttaaaacaatttctaatatattcatttttgatactcctaatttttaaacttttaattattgtttatagcttctactattgccctttcaattgtatctttatttaatctatcatatttctttttctgatttattattaaagttccttttgttataatcccatatttttttatatacgaaaaatctttccctgcttgatataattttatttccaatttatcagcatacttttctgacattttttttataaacactccatgttcatcacaagatggtcaagtgtttataaattcaactaaaattttagacatttgttcatcccctactttaaacaatttatcttttacttaaaataatccacagaaaataaatttttctatggattgtatcctatactaatttataacgttataacttggtccacacctgcactgcctaaacaagcatataggtttgggaaacatccaattgtagctccatcaaccaaattattctctatacctctttctatagcacattggtcacaagccattattatcatatcagttttttcatgtaatttacttagtctctcgcctactggattacctttagataaaaataaggtattatccataaagaaaaacatccctagaacgtctactccatgagttccttgttcaagttgtggtattatcattttgtctagaattttatgtgtattagtactactaaaaatataagctactttcatttttattccccctatactttttatattttacaaaattttacagatacaattatattataagtttattcttatttatctgtaaaatagatattagctatattattaaaagtgtatatagtatttatctatttttattaaattattgattgatttttttatatttttattaattttaatgaataaaaaatagactccttaaatttataaaacaaatttaaggagtctattttaattaagtttatttcaatataaaacttatatatttctcaaattcttcatacttatatcgagagctttaacagaatgtgtaagcgctcctacagaaacaacatccacaccaatttttcctatatcttctatagtatctaaatttacatttccggaaaattctacaatggctcttccatttataatatctactgcttgttttgccatttccaaactcatattatccaacattattatatctgcattagcttctattgcttcttttaccatgtctaaagtttccacttccacttctatctttctaacaaaagaagtattttttctagctaattcaactgccttcttaacactaccagcagccccaatatggttgtctttaagcaatattccatcagataaattaaatctatgattgcatcctccacctactttaacagaatacttatctaatattctaagattaggtatcgtttttctactatctaataattttgtatttgtaccttcaagcttttcaacatacctacttgtaatagtagctataccactcattctctgtaaataattcaatgctacacgctctcctacaagtaagtttctagtactacctgttaatacagctatcttttcacgattctttactctatcaccatcatttttatataattttacatctacatcaccaagtatctcaaaaactctcttaaatacacctaagccagctattataccatcttgtttgcaaattaaatctacagtagatttagaattttcatccacaatagaattagttgttatatcttcacttggaacatcttctatcaaagcatcctgtatcattctatcaataatcaaataattcatcgccaaaatcctcacttgttctttcaatttcttttatgactaatattttattttctttttttacctgttctatatctatatccatatctggtacatctataaacttaacttttacattatctataactgagtttatatttttagctgctctttttgaaaatacaagcccttcaagtaatgaattacttgccaatctattggctccatgaacacctgtacaactaatttcaccaactgcatataaattttccatagatgtttttgaatccaaatctacatgtatcccgcccataaaataatgttgtgcaggagatacctttatacattctttcgttatatctgttcctctagctaaacattcattataaataaaagaaaatctattaattaaatattcactatctaaatgtgttgcatctaaatacacataaggtaatttatctttttccatttgctcaaaaatagcttttgaaactacatctctaggaagaagttcatccacaaatctttctttatttttatttaaaagtttagctccctctcctcttaatgattcagatataagcattctcctaccttcattattttcttcataaaaggctgtaggatgtatttgaatatattctaaattttctatttttatattatttcttaaagctattgcaattccatcacctgtaagatgtctttgattagtagaatttttaaaaagcccaccaattccacctgtagctaaaactactatttttgaaaaaacatgaatctcttttttagatttaaaaattctagctcctatacatttattgccatcttttaatatatctaaaagatatgcatcttctataagagttatattttctctagttttagcttcttttaataaagttttaaaaacaacttctccagtattatccttactatgaactattcgatttacactatgtgctccttctcttgtgtaatctatctctccattttctttgtctaaaggcataccatattctactatctgccctacattttctatagattcatctgcaagtacttgaactgcttcaactctatttttatactgcccagccttcattgtatcttctacaaaggattctatatcatcaatatttctagcagttgaaattccaccttgtgcaagatatgtattgttgttttcaattgttgatttcgatactactagcacatttaaacttttatctaaatttaatgcacagtataatcctgaaactccacttccaactattaaaacatcttgttctaaattcataagtctatccctctatccttctgctaatttgtgcatgttaagcagtgaatttaaagccttttccatgatttcatcttctacaataacttcattttccatatttttaagtgtactatataaattttctaatgttgtctttttcatatctgtacatagtatttttccaccaggaatataaaagtttttattaggattatttttctttaattcatgtaatataccttcttcagttgctattataaagtctttgtttttactattagtagcatattttattattccggatgtactacctacataatctcctaaatctcttatttcttttttacattctggatgtactaatacttctgcatttttatacttatcttttaattcaattatttcttcagctcttatattgttatggtatttacaatatccgtcccaaaatataaagtttttatctggaaattgttctgcaatatatcctcctaaatttttatctggaaggaatataatttctttattatctatgttttctagtattttaattgcactagaagatgtaacagaaacatcacaatgtgccttaactttagctgtagagtttatataacatacaaccaaagcatttggatactgttgttttaattttatcacgccttcttcatctaccatatctgccatagcacacccagcgttacttactggcatcaatacagttttttcaggtgataatagcttagcactttctcccataaaccttactccacaaaatacaaccacttcttctttacaatctctagcaatctcacttaaataatatgagtcaccaactgcatctgctaattcttgtatttctggtggttgataaaaatgggcaagtattattgcatttttttctttctttagctctttgatttgatatgttaaatctttatccataattgcaccgctttctatatgtactagtgtatatacacctgtaaacccattatatcacttgactattctttcttcaagaattttaaacctcttaatattgttaagatatagacatttatattctcaattgattttccttttttctccatctatttaaactaatttttatattttttaatttttttgtaaaatattatcagaattttgtttatattctttattgctataacattgaaaatattaccaaatacctgtatactaagtacatggttatgtatatgtatttatttctgaaattatattagttgtaatactttatagaatttgtaggttgtccagaattaaattcaatataaatctacacatttagataatatgtatacaaagaccaaaaaattttataaatggggtgatattatgacaacattcttaatcggcttggctatattactaataggaggtgctttatacggtgcttattgtgaaaaagtatttggcccagatgacagaaaaacacctgcacttgctcaaagtgatggagtagactatgtcccaatgaaaaaatggaaaaatagtctaattgagttgcttaatatagctggtacaggaccaattctaggacctatccaaggtatattgtttggtccaatagcattcatactaatacctattggctgtgtatttggaggagctttgcatgactatatgagtggaatgattagtataagagaaaaaggagcacaaatgccttctcttatcagtagatttttaggtaataaagtatttcaagtctataatatattcctttgtcttttaatgcttttagttggtgcagtttttatttatacacctggggatttagttgttactcaaattttaaatatgaaatcgactataaataatccagttgtctggatagtttatggacttatctttctatattacttgtgtgcaacactctttccaattgataaaatcataggaaaggtatatccaatatttggagctattctacttttatctgctgctggtgttggaattggaatctttacacaaggttatgatttagctaatttaagtcttgcaaattggaaaggtattcatcctgatggtattcctcttattcctacattctttgttacagttgcttgtggtatcgtttctggattccactcaactcaagctactcttatagcaagatcagtttcaaatgaaaaagaaggaaaaactactttttataatatgatgattttagaaggtttaattgcaatgatttgggctgcagctgctatgggtatttacaataaaggaatacctaaggaattagtaggttctcctgatgtaataggtttggttgcaagagatttacttggttctattggtggtatcatagctataataggtgtaattgttttaccaataacttctggagatacagctttaagatctttaagattaatgcttgcagattactttcattatgaccaaaaggaaaagaaacatcgtgttatattgtcaatctgtatatttattcctgtcatagccattcttatatttgcaaagcttagtgcttctggatttaatatattgtggagatacttctcttggagtaatcaaactattgccatatttgcatttgcaatgattacagtttaccttataataaaagaaaagaattatattataagcttaattcctggtatgttttattcttttgttatattcagttatatatttaatgctcaaattggatttaacttaaacataaatatatcatatgttttagctgccatatttactgtattatatgctattttaactgtacgctctggtagaaagttaaaaagcaaagcggatactaaattggctgactaaatctaaataaaataatacttagaataaattttattaaaaaatgataaaaaagtaggcaatctcaagttagatttgcctcttttttatttaatacagtaataaatacttaagtatttactccttattggaatatttatcctaaatctctaatataaataaataaaagttttaaaataatctattcatttatatacttaaaataaattttttggaggaatacttatgaataataaattacatgaacttgaaaaaaatctaccagaaacatcttgttctttttgcacacatctttcatttaaggggcctagcctagactatagatatgatattagatgtgttatttcagatacaaagcctgattttagaggatgttgtgaatattttgaaccagaatatacagaattaaatacaggagatttagacaatctatacataaactttcttgagacatgcctcaaggtaaattataatgattacatcaattctatgtattggaagttatttaaagaaagaaccctactagaaaacaattttaaatgttctatatgtggatcaactgaaaatgttgatgtgtatcatgttaataaaaatttaggaagggaaacttccaaagatgtagttgttaaatgtgataaatgtaattgtaaataagtgtataaaatttagataacttcacataataagtttaaataaaacttaggaggttatttatgaaaaataataatttaaattgtgctgctactaattgtgcttataatactagtggatattgttatgctggtagtataaaagtagatggaatgcaagcaactactacagaaaatacttattgtgcttcttttgaagacaaatatacatctggtataactagtcgttctaatgaaactaaccaagttgatacagataacattcattgtgaagctgtaaaatgtaaatacaataaaaatgaactttgcaaagctgaaaaagttcatataaatgaaagaaatgcaagttgtgaaacttttgaaatgaaataaatttctttttatttaattctatagtatttatacaaagcaaaattgaacctatcaaatagatgtctttattaatgatgtctatttataggttcttttttaaaacaattcataatttatatataaaaataaattattattttaatatattacctagaagtaaatttaacacccagaatatccataaggaacataaatattggaactccaattagtaatccccatacacctaaataatgttctcctacaagtaaaataataaaaacaaaacaaactggaagtttagttctattcgacatcaacttagggtttaatatgtatgtttctactgcatgcactatacaaatcataagtaaaactccaaaaacctttgttattcctcctgtattaaatgctattacagttaatggaatcaaagacactataactcctgctactggaataagacccaacacaaaaatcataaatcctaaagcccatatttgagggaatcccatgaaacctaagaaaatcatagaaacaacagaatttataaaggcaatcataacttgtactttcattacttcaccaaaatttttaacaaagctctttccaaaaaatacaagcgaattataaataaaagaaatcttactatcagaaagtttatctccaaaatttttaatttcatttttttcaagtaaaaggagtaaactcagtaaaaatgccaataatatatttactccaaaacttccaacttttgttgctgttgatgctataagtagccctgcttgtgaaatatatttattaaaatccagctttgagacaataggatacaattttggtcctaaagattgagcaaattgatttacatcaaaatcactaaaaaccctactcagctctgtaagttgaactataattattggtacaactgcatagctaatcaatactaacaatatagcaaatagtgcatataacactataattatcaatgaatctggaatatttaaagaagaaaacttcttaattcgttttcttgtggctacaagcaagttatagaaaataaaagtcataataaatgttaaaagcaccatatttaacatataccaaaatgtaattagaataattactacgacagatatagaaacaattttatattttgaactatcacgtgccaatcctttgttatcttccatagtttaaatcctccccaaatttttatgactttataatgactgccctttttattttaatctcaaaaaacaagtagaaaaatactaaaaataacttattaattttcataaaacaatattaaaatttagagaagatacattttaaataatcttacttatactgaaatctgctctacatcatatatttaatttattattatctatctcatatagcaattcgtacatctctggatattcaaaaaacaaaccctcttttagtaattgtcttatttcatctgtgcttacccactttatatcacttacttcttcctcctgtaaaatagctttggatatatcatattcttttttaactaagtatacatcccaaagagtatcttcatgaatcatacttctaaaaactttcatctcatctttagttatatctatccctatttcttcctttgcttcgcgaattgctccttctaaactatcttccccagaaacaatacatccagttgtcattccccacatatttggcaatgtctttttacttttagaccttttctgaattaaaatttgagagttactatttaaaatccacacttcaactgccaaatggtaataaccttcttcaatagaattacctctttttataacatttcctgttttaattccatcagcattatataaatcccataattccatttcaaaatctcctgactttactataaattagataaactacaaatatattttagcataattaattctgctcattttttattacaatacttgatttacatttatgttcattgcttctcttttccttccattctcttatatcatctataataaatctatgtttcagcaactttgtgtcaaatttaaatattctaaacactatttgtaatacatatcctaaacctaaagcacttacaagcgtaccaatacctacagaacctcctaataaccacccaacaactaatgctagtatttcaagaattgttctaacaagacgtacagatttattagtttttttctgaagagcaatcataagcccatctctcggtccacttcctaaacaaacacctaagtatagaaaacttgctatagctgccaaaataattcctataacaaccataaacacacctatataagtgttgcttgcatgaggtatcactccagaaaatattactaaatcaataaaaattcctataaatgtcatgttgagtaaagtaccccatcctatattttcaccaaaaactgcatccaatataacaattacaactcctaccattatagaagcctgacctatagttatgcctagctttatagataaaccttggtgaagtacatcccaaggcataagacctacatgtgcattaatcataagcacagaagaaattgcaaatataaaaaaacctgaaaataatcttatcatactttttaaacttatttttcccatcaaaaatcactcctcataataataataacaataaataccaataaaatatatatataaatacgaaattttacagaattatttattagattaagataaaattttaattataaaaagtggcaatccaaattttatacattttcacctatactctaagctttcgtgtataaaaaacggatataccacttttttagtatataaacatttttaatttttcttattaattttcactataaattctagcttcttcttctccatttagtactcttaaagttccaaaagcaagtgattccaactcattttctcctgccataatttctactggtgctataaactcaactttctttttaaccattgaagtaaacatttcagaatatgcaattccacctgttataattatagcatctacctttccatctactacagttgctaactctccaataccttttgctaactgataagccattgcttcataaataatttttgcttcttcatttccttctgctatcattttttcaacttctctagcatctacagtatttaggtatgaaactataccacctttacctcttatctttttagtcatttctctttctgaatattgacctgaataacaggcagccactaattttgtagcaggtactcttcctgacctttctggagaaaatggtccttcatcatcagatagcatatcaaccattcttcctttttcatgaagataaatacttactcctccaccaatgtgagctactattaagtttaagctcttataatcttttcctttatccttagcatattttaaagccattgctctagtatttaatgcatgccctgcacttgatctatccattccacaaagtccagatattctcgctacatctataagctcatctactgcaacagaatcataaatatatgagttgattccaagaggttctgatattgcatgtgccacaacagcacctaaattggaagcgtgttcaagtactggtctatgtcttagtacatcaatcatttcttcatttactagatatgctcctgattttactggtggtaaaactccacctcttcctactattgcactaagagattttaagtctatactattttctttaagaatattcaaaactgcttccttacgcatttcaaactggtcttgtatagtattatattttgcaatctcttcagctggatggtctatcgtcttcacaagaatttgttcttctccatcatatactgctatttttgtagaagtagaacctggatttatggctaatattctgtaagtcataattttcttcctttcaccttaatttctatagtctatttatatctattataaactatttgctaaccatttccataccttcatggaaagcttttatgtttaattcaacaaattttggtttaacattttcacttataattttttcccaatcaatagactctaattgcatagatttaactagacatcctaataaaataacattcattatttttgaatttcctagttcttcagctttatcagctgcatttataacttttgcatttaatctacttaactctgcatctatatcactttcttgatattcagctcctccgattaaaacagtcatagaatctatcctatgattatttactaaagcttttccttctggttttaaataattgaaccatcttaaagcttccattttttcaaaagatactaatatatctgctccaccaatttctataactggagaatgaacacaatctccatatctaacttgtgaggaaactgaacctcctctttgactcattccatgtatttcactcatctttacatcatatccagcttccatcaatcccatagttaataatttactagcaagtatagttccttgacctcctacacctaccaaaagtatactcttagtcatattatttttcctccttaactattgcttgttttggacaaacttgtgcacatactccacatcctacacactgatttctatctatatttgataacttattctctttatcaaatgatagagctggacatccagttttcaaacataatttacatcctatacatttatcatggtcaactttacacttagtcttaaatggattattaaattcttctatatcttctttagagaattttttaagtacacatggccatcttgttattattactgatggttcatcttctatagctaaagcccaatctagtgcttcatttacttcttttaaattgttagggtttataactcttacatgttctattccacaagctttaactaatccttctatatcaacttctttagttttagcaccttgtaaagtataccctgaacctgggttttcttggtgacctgtcattccagttattctattatctaatataaccgaaatagaattacctctattgtaaacaacatctaaaagtccatttattcctgtatggaagaatgttgagtctccaagtacacctaccaatcttttttcattatcatccttcatattaagaactttttgagctccatgtgcagttccaaaagcagaacccatacaaacaacataatctattccattatatggaggagcaaatccaagagtataacaacctatatctccaccaactattaaattttttctctttccaagttcatagaagaatcctctatgtggacatcctgcacagaaacttggtggtcttggtgttactaattcagatttgtattctatagtatcatttgtttttccaaatatagcttttcttaaaacatctggtgtcatttctccatatggtggtattacatcttttccaatacaatctattccatatgcttttatttgttcttctataaatgggtcattttcttctataacatatattttatcaactttttctgcaaattcttttattttttcataaggtaatggatttgtaaatcctagtttcatatatgatgcattttttccaaaaacttctttggcaaaattacaacacataccagaagctataacacctatttttgtatcattcatttcatagtagtttaaatcagtttcatttgagaattttttaaggatttccattctttcttcaacaacgccccttcttatttgagcatttgctggaacagttaccattttcttagcatttttaacatactctttaatttcaacttcttctctatcatagcactccactaatccttttgaatgacaaagtcttgttgtaactctatataaaactggtgtatcgtatttttcactaacttcaaaagcttcttttatcatatctttagcttcttgactagttgatggttcaaataaaggtatctttgcaaattttgcatacatcctattatcttgctcattttgagatgaatgcattcccggctcatctgctgtaataagtaccataccaccatttacccctgtatatgcataagtaaatattggatcagctgcaacattcaaaccaacatgtttcatagaagccattgttcttgctcctgcaattgaaccccctatagcagcctcaagtgctaccttttcgtttggagcccactctgcaactattgcatctttatatgttgctatattttctaatatttctgtacttggagtccctggatatgcagatgcatatttaacaccagcctcataggctccacgtgcaattgcttcattacctgtcatcaattgtttcatataaaattccctccatctacaattattaaattcatagtccacccaatttgttcaatgaaattaattatttatttttacttctaaactttcaagtgcttcttttataatacttggtgctttcttacatttatcttcagaaactgcacaaactgcaaatcttaagcccatttttaatggaactgcaaataaattatgtttagtcaattcttcacatacttcttttggattatcacatggtatacttacaaagaaacctgctatatatggaagaatttctaatcctactctttcagcttcttctacaaatacatctgctcttctagtaagcatgtttttgtatatttctttttcatcctcatattctttgaattttttagggtcatttacaatgttagataatactgccatggcacttctattacaatttgaccaatttgctctacatgaatgaacacatgagtaatggaactcttcagctacatcttcacttgaagatatacaaattatagcccccattctcataccataagctgtaaatccttttgacatactgaatccaaccaatacgagaacgttttcaggcaaattagaaaatttcttaaaaaactttctacatacatcatcatcacctgcaaagtcaatatatgctgaatctacgaaaaatattatctttttgtctttatcttttgcgacttcttttgataagtctaatattttatcccactcatcatctgcaacactatatccagttggattatgcgctggtgtgtttataattgtaaagactctaccttgtttttctgctatatttacaaatttttctttgaacgactcaaaattaaaccttctattttcatcaaaaagttggtaattaactacttttctattagcctcttcagctatacttacatatggactccaaaaccaatcagatgttaatacctcatctccttcattagtatagttccatacagctaattttattgcaccacttcctcctggtgaagctaatactcttatatgtccttctggtaagtaatctctgaaaaatacttttttaactgcttctaagtagtctggttgaccttcaagagctgcatatgcacctatctcacagttatctaatgctttatattcttcatatacagttttcattgttattaattttcctgaatcatccattagagcgcctattgttgcatttattacattatccataccaaaagccttctctgctgcttgagctctaccagatatgctaaatataacatcattttcttttggccacattgcatgcttaccaaccatactttgactcataccatcacccctaaaattgtatttactcttacattatatattaagcaattactatgccaataaatcccactttatgtaaaattgattttgtttagaattattatttttttcattattaaattaagtgttttaactatttttcttataaatatatatgcctgtctaaaaaaataaaaatttacaaaaaagtaatgttaatttttcttaacacttgttttaaaaaattaacattacttcaaaataatttatatgtaattatatttaaatatttttattgtatttcttccataaagatgtcctgcttattccaagaacttgtgcaacttcatttttagaaagtccctgagcaaaaagcatacttattattttttcttcaacatacttatttacttcttttatatctatacttatcttaccatcatttatcttacttatatttatagattcatcttggacttctacacttgctgtcgtttcagaattaaatttgtctacttcagagttaggaagtaattttttagttttaaaatctctatcttgtctcaatttaattttacctgtcacaacatatttttgagctattgtctttaactctcttacatttccaggccagctataattatatagcttatccatttcatctttagtcaaaacaaaattttcatctatactgtttattccattgagaccatcatcctttaatacttcatttacaaaattgttaaacaaaggtattatatcttctcttctgtctcttaaaggaggtatatttatctctaaactactcaatctataaaataagtctgctctaaatgtacccataactattttttcggttaaagattcgttcgttgctgctataatccttatatccagaggtattatataatcagaaccaattctcattatttgacgttcctctattactcttaatagttttgtctgaatattaaaggatagactatttatttcatctaaaaaaagagtccctccatgagcaagttcaaatagtcctctttttccaccctttctagcaccagtaaatgcaccttcttcatagccaaaaagttcactttcaagtaaattttctgctatagtagcacaatttatagcaacaaaaggcctatcttttcttttacttatattgtgtatactatgagctataatttctttaccagacccactttctccataaagtaaagttgtataatcactttttccaatttttttagcttcttcaataaattctctagttaatttatctttaaataaaaaatcatcaaaagtatatctagcatagagacctttttgattcaagtcaaatcttatttttctttctaagttttgtagcttggttatatcttgtattattcctaaaactccataagtactattatcaacttttattaatgttgtcctagtattaacaattagattatttatatttcttatctttctatcttctacatcctctttttcatgtaaacaatctaacatccactccattttaggaaatacatctaagatgtatttattaagtgcacattttctctctactttaagcatgttttttgcactttcattgtacaaaattatactaccattactatctatagcaattactccatcttttataccatcaagtatatttcgtaacacttcattattaaacttttcttcacctaatgtatccaataattttttacaatattctacagcttctcttatagattcatcactagcagttgcaaatacactatcaattccatattgccttgcaaaagaacatgccaaacctcctcctacgattacaacttcatctttttggtctatatattttacaactttacttcttatctcatacttagattcaaaccattcttcagttatttcagtacttatgacatttctccagccaacatagtcaaaagaaacttcattgtctccaagaatcaatactacttttttagaatatttctttgctatttctattgctcttaaaaggtcagttgacttcatattcattggtataacaggtacatttactgtatctattactaaactataacctccacctctaccaattatagcttgggcacctttttcaacaagtatacgaccttgattttccattaagtctaggttaagtatgtcgattattatagttccattttctacatcttctctatataattcttctattctttcttttaattcaatatcagaggctataattcctattttttttcgcaacaaaatcacctcaattttaaattataatgtattgatttctacctgctttttttgatttatataggttcttatctgcatcttcaattaatatttcaacatcttttctactacgacatctttttatacttactccagcacttatagttatatagttttttattttagaatatatatgttcaataccctcaaattcaagaagtttgaaaactcttttaatatataattctatattatcaatctcttcaacaccgattgattctatagaatctactagtattaaaatttcttctcccccatatctgattatatgttcggtaatatctataaatacacttcttataatatcagttaccttaactataactttatctcctgctagatgaccataattatcattataacttttaaaacaatctatatcgactagtattgcaaccatatttttgtctctggttccattaaataaatccaactgctgttccaaatatcttctattatatagtttagtaagtccatcttttaaaatatcattttctaatttcttattatcatccactagtaatcttaaactctcttgtttttgtctgagttcatattgtttgtgaattgcttgagatgttttataggaattatttttttcccacctatcagaataccaatccatacttttataatattctattgccagtttaaaatctttttttagctcatatccatttgctattagcccataaaatatagatatttttctaagattcaatgaactctttttaactaaatttaaaccttttatataacaacttataccttcatctatattaccaaattttatatataaatctccatacaacttatatatgtaatctagtttagaattatatataaaaacatcgccaaaacttttatatatattttttgataaaattaaataggtatttaccttttcaaaactacaattatctttccttaactcaatttcagctgaatataaaaatataaatgaatataaataatccttatatacaccttcaacaactttcattaattttatagtctttaataaaataacttctgcttctttattcatatcttcttttaaatatgcccatataaggtctatctttatagacactctttcagttactgatattgagttcttactgtgcgcaacatctaatacattatttatgtattttatagcttctacattatttccactctctaaataacacaaacttattatacatttacaaaaagcctctatagaatataaattattttcttgagccagttttagacattcaattaggtactccatactttttataaagttattaaataaatatagataaactctcccaaatatataatttgccctacttacaagagctttattttttaaagttttaaaaaaagacacttcttctactaaagctattacatccgttttggtctgatataaagcacttatttctacacataaactcatatttaacaagactagcaactcatttaaatgattttgtcttataactttttttgctgagaaataaaaattatttgccttatcatattttcttatagaaatagctgataaagtaagataaatataaattttagatattatatctgaatcttcttttaatgacaattttttaatatactttaatgactctatcaaatagttgtatgatgcttctctatctttttttatatagtttataaggctaattaaatataaagtatagactctactattatcttctagttttgtatttaaaaggtctttgtgataatccaagatgtagtttaaatctgtcaaatttagatagaatttagtcaacatatcgtattctatcttgtttatatttctctttaaatcttctattaaactccttttcaagtaaatcaccaatcctatttcaacagttaaaaattcttaaaatcatgataatgcaaacatctatttctaccactttcctttgctttatataaagctttatcagcattttcaattatttctcttatatctatactactatttttacatgtatcaatgccaatactaactgtcaaattattgtttaaaaatttctttacaatcctacataattttcttccaaatattttgctttttttataatctttacatacagataatatcagaaattcttctccaccataccttatcataaacatgtctttttttagatatttttttattattatagttatatttttaagagcaatatctccattatagtgtccataagtatcattgtattctttaaagtaatctacatctatcataaatgctgtgcaatattcactaacttcttgtttttctaaaaaatcgttcaaaaaagttctattatatgcacttgtcaaatggtcaacatatttttttttatctaaatcaagttttacttttctcatgttatttatttctgtttctatatactcatgtctataatttaaggaatctatataatttctatttcgagcttttatatacatcatttttaactcataatacattttaaagtatttcatactcatttcataattttgaatcttttcaaaacacaaatatatattcttgtatgctaacttcacataattataatttttagcatttttagatttttcaaggagttttttatttgtgtttaaggcattgtcataatatccaaagatataatatatctttgcctgatgataaattatttctaaatcatatattgtatattcttctatattttttatcatatttaagatgtttttagctctatctaaatagcatattgattgttcaaaagatttttcattactttttgcataatacatagctaaacttataaataaatcaaacttctctacttcttttaagctctgatttttaattttttctagatatacttcagattttgctaaattatttattgctacaggataatttctagtctttattaatattttagttatgttgtttgatgctctatatttttgaattatatttacatttctatactttttattgcttattacttcatttaaatattctatggaacattcataattttcaaatgaacattcacactcacctatctttatattacatagtgaagatacttgcatatcctttagtaaatctgcatattttcttgcttttaaaaaatttactttagcaattagagcatcatccaaaaacaaaaaatatattttaccaataataaaaaaatatatttttttacagttaaaatcgttaatttcttttatctttatatacaatgtttctatttctttaattattacagaagattctatacacttacttgccttaatgtaaataagttgtgatttaaaaataatttcttcaattagaaaattattttcatcacaaataagattaaatttatccatatataaatttgccttatttacatcttcattttttaaacttaaaatagctatttgtgaataaaatcgtgctaaaaatttataatctttgggtaagcatttatcaatatatttacaggaaatcaaaatatactctttcattttttcactaaacccttgaataccatataataaagctagcaaaaaatttgattttaataacattaaactattttgttcagttttatagcaatcaattaaattctttactacaccaattttattttcaacaaaatcgttattagtcaataatctttcattcaaggttagtttaaacattgaatctaaaattgtatcatctatctcttccaaatatttactatatattgtaactcacctccgacttacattatctcataaatttagtaattttccatactatttttgaaaaaaattgatgtctcaatttagaaatttctcttaaattaagacatactttacactaaactatacaattttctatctgaactatataatcctgacaattttcacaaattatcacacttacaatataactattatcaactttatttgcccttgatagtttattaaaagatagtcctttataatcaacagatatattgcttattacatattctccatctttactgaaaatataaaagtgatattctaaaaaaggaaagaattttttcttttcttttactccttctaaacataatggacatgcttcttgataatattctacatcaaaatcaacttcttctgcttcattaagtatatcaattatttttgaaatacttactccttgaactggattttcttcatcatttattaaagcactacagttctcctcttttaataaatattccttatcatcatatataaacttgtataaactcatattatatcctccttataattattaatctccaagttattctaccacttaaataaagttaataaaagtaattgtttataatctttataattaagttatgtatacatatattcctatacactatcttaattaatgattttaaaatccaagtttacactttgaacatccagtttcccaaaatctattgtcaaaactcactttagttattaatataaggatataaatatataactgcatagatgttacacacttaactatttaatatgatacgatttagtatctaaatttatatattgtatatagggggagatatatatgtataaagataaaagtgatgaatgtatacacttaatgactgcatacatcgatagtataagtggatattattcatttattgacacacaattagaagattttatggtgaaatatggtgaaaacattgttgattcaaatttacacagtataatgatgttgctttgtaaatggggattatcttagcattttaagaaacttttttgtatattgtattctatattatttattcattaataaaaaaagattgacataaacttaaaagctatatatagatttctttaaaaatctatatatagcttttttaattttttcaaaatgtatacttaaataagttagttttttttcaaaatttgactatctaatatgatataatttaactatctacaacaataaaaaatatctaatatgtattatctagtttagctcatcataataacatccctatatttacaattaagatattttcaatatagtaatactcaattttaatattataaaaaggagagattttgtatgaattacaatgacttactaaaatcagctagagagaactttaatggaacatgtaaagtatgtaaaatttgtaatggattagcttgtgctggagatgttcctggtatgggtggtaaaggaagtggttcgtctttcattgaaaatagaaaaagtctagaaaaaataaagataaatatgagagttatacataatgtttcaaagccagatacatccatagaattatttggtagaaaaatgagttctcctatattcgctgcacctgtatcaggtactctattgaacatgggtggtaaagtttccgaaaaagaatacatagagcctgttgttagaggttgttctaattctggaatttatgctatggttggcgatactaatgtagatacttttttactggataatttagatgtgttgaaagataatagtggaaatggaattgtatttataaagccttggaataattcaaagataatagaaaaaattagattgtctgaagaagcaggtgcttttgcagttggtgtagaccttgatgcttgtggacttattaataatcaatttcaagaaaatcctttttctcctaagacaattgatgagattagagaattggttgaatctactaaattaccttttattataaaaggaattatgactgtagatgatgctttgatggctgtagagtctggtgctagtgccattattgtttcaaatcatggtggaagagtacttgattatactcctggtacttgtgaggtacttccagatatagctaagtctgtaaagggaaagataacaatacttgttgatggtggagttaggactggtgttgatgtagttaagatgcttggattgggtgctgatgctgttttgatgggaagaccttttgttactgcttcttttggcggtggtcttgatggtgtggagttttttatagagaaggttaggaatgagttatgtgagactatgattttgactggttgtcaaaatgttaaggatatagatggtagagttatatggaatttattgtaaaatatttctagactctaagatactgattaatatattctatataaaaaagttgtcgccctatttcttagtgcgacaacctcttttctaataacgctctccgacagcttgccaagtggcttttccaacaacaccatcttttgttacaccaagtcttccttgaagtatttttacttgattatatgtagcaggtccaaatttactatctggatcaatatcagaaccatttatttgttgacataaaagttgtactaaatgcacaggattccctttttctacatgtccatatcctactacagtggtatttatatttacgctataacttataggaccagtagcatcaaaacgatttaaatcttttttatatctaataataaatgcttttggttcaatattataatcatctatattaatattatatgaatctataaatttttcattaataaagattgtatcatctttagatggatttatatttaattctttacatttttttcataatcagattttataggttgtggtacattttcataaataaattcgtaaccagttattgtaaatgaatttgttgtttgctcttcattactttttcatacatttacatcattattagtatttgcaaatactaaactaatagatattagagtcaccctccctgtgactactaagattttttttagatttttaatttcaaaacttctcctaatttgttaataaattataatactataaaaatctattaatttacaactctcatgctaatatcatcttcttccttaagatctgcgcctgttttttctaaaatccctatatttcttaaataatttgaattatcaaaactaatactttcaaaattaaaatatgtaactgaaaataatgtaaacaaaatcaataacatcaatattccacttttcccttttttcttaataatactatcaagtctcttttccaaatttgtcttattaaattcagttgttaaaataccactattataattcttactaagtttaattgactttataagtgctaacgcatatgctttcttatcttttaaagagcaatcagtcaaaacactttcatcacaacataattcacaatctagatttactttattgctcattatataaacaagtggattaaaccaatacattattttaacagacaaaactaaaaactttattaaaatatctttgtttttaaaatgcattaattcatgtttcaaaatccaagttaactcatctttactataagtatagtctggtaagaatatgtaagatttaaataatcccatacctgctggacttatcaattcatcagaacctcttaactcaattttcttttttatgtctaattcttttaacaaatttttatagatacaatttacatcatgatcttcaatatcataagatacatcaacaacgagatttttaaattttgtgtattccataaatgtataaactgcaatggctatagttacaaataaccataaataaactaaatacagcataaaatcattatctatagaaacatcaatttgtgtaatattatttcctactgtattttccttgggctcttttacttcatacattactgtataattaaatagaaaaagtaacattctaaagactattaccaaccaaatataataattaaatctcttactaaacctcttaaaaaaatatcttttcaaaaataataatagacaaataccaaaactacatacaatagttgtctttataagattgtcaaaaacatatagcatataattattcattctttaaattatcaaaataactttctaaaaaatctagcgtgtctttacctatattttcatcatcatgtaatgctgaaattaagcttttcaaagaatcatcatgtatattacttaggaaatcctttgtctcaaaacttaaataatctttgtgttttactattactgtgtaatgtgtatatctgtctattttttgagcatttaagaatcctctttttactaacctcgataaaagtgttagtgtagtggtttgtttccaaccatatttttgttccataacttcaataacatcttttgatgtcactgtagcatctactttccaaataaatttcattacttttagttctgcttgtggtatttttcttatcatcatttacacctccctcaaaactcttgctactttaagtctacaatatgtgaattttttagtcaaacgctttatgaaaaaatgtggatttttgtactttttattaattttctaattttttaaaatactaaaagttagattttaaaatatagttgttcaagtattttgctttttacatatttaattataatagtgcagaatgttatttccacattaaaattatttaataaaaattcctatattttcacacaaggaatattataatacttttttttaaataaactagagtaatatctaataaattttaacaatctcctaattgtacctttgtgttattaaaatatctgttttatataagtttatgttataagtaaaattatacatagcaaataaaggtataaaaacaccattttcagtgtctttaaaataaagtttgtattcttctaaaaagttgtgataattaaaatatcactactatacaaaggaagatgttcactttttatgtttaacaaaaactaaaatattaaaaaaatttattgaagaatatgatgccaaaacaattacagatattcaagatatactaaaagatttatttgaaagtacaatccattaaatgttagaagcggagcttaatgaacttttaggttatgatagaaaatgatatattaggaataaaaaatcaagtgattggaatatactcaaaaggcatgtctactcaaaatatattaagtcatcttaaaagtacttatggaattgatattatctcattcactaataactaaaactactgataaagttattcctttaactcataaatggtaacttagacctcttaatataatttattcaattgtatttatagatgctatacattataaagttagaagtgaggtcgaataataaacaaaacagtctatatagctatatgtagcataaaagaggttttaagaatatggattggagaaaatgaaatttcaaagtattggctaaaagtgcttatagatgctagaaacatgggaattaaagatgtattaatagcagcttctatagatagactagttgaattttctaatgcaattaaagcgatatttcctgatacttaagtacaaagatatgttgtgcatcaaattaaaaatactttaaattatgtatcatataaaaatagaaaagaatctgtaaaagatttaaagaaagatatgctacaattacagaagaggtagcattaagtgagctatcactagagaaaaaatagtacaatcaatatacaatagtattaagaggttggtgaaacaattggaatgaattagtaacatattttaagtactctcaagaaataaatacatcgatatatactacaaattcaatgggaagttagaatagattattaagaaaagttactaaattgaaatctatttttactttggataattatttgcacaaatcactatacttaacaaccatatatatttcttaaaaatggactcagaaaattagaaattgtgctcaaattttagctcatttaagtatttattttgaagaaagaaatttttcaaaaaaacaagaaattttcttaaagggttaatagcttttgcaaaaatggaaaagatatcaaaataaggctatgatttttaaagccatagccctattagtaaaaatttaattatcacttaaaaaataaatttttatttaaagaatacatgtaaatgtttacagattcagcaatttaaaattatctgtgcaatagctttctttttaaagacgtcttccagctgcatcccaagtacttcttccaacaattccatctcttgttaatccaagtcttccttgaagtgacttaactgcattatatgtagcaggtccaaattcactatcatcatcaatacttgaaccatctaaggttctacataaaagttgaactaaatgcacaggattacctgattcaacacgattatatccgactacagtattacttacatttaatgtataactcttaggtccagtaacttcaaaaacataaccttttttatatctaataatatatgcttttggctcaacatagttttctacatcatttgcatctatagaatctttgttaacaaaaattatatcatttttagatggttttatatttagcgcttcacattttttttcataatcaaattttacagattgtggtgcgttttcatatgtaaattcataaccagttatagtacatgaacttattattgaatcatcatcctttgatgtatctacatcagtagtagtatttgcaaataccaaactagtagatattagagttagacaacctgtaattattaaaattttttttaaatttttcatttcataattcctcctaatttattaataatacgacaatataccttttcattacatacattaatctattaatttataactctcatgctaatatcatcttcttccttaagatctactcctgatttttgtaaaatccccatattccttaaagaatttgaattatcaaaactaatactttcaaaattaaaatatgtaactgaaaataatgtaatcaaaatcaataacaccaatattccatttttaccttttttcttaacaatactgtcaagtctcttttccagacttgtcttattaaactctgttgttaaaataccactattataattcttactaagtttaattgactttataagtgctaatgcatactccttcttatcctttaaagaacaatcagtcaaaacactttcatcacaacataattcacaatctagatttactttattgctcattacataaacaagtggattaaaccaatatattattctaacagataacactaaaaactttattaaaatatctttatttttaaaatgcattaattcatgtttcaaaatccaagttagttcatctttactataaggatagtctggtaagaatatgtaagatttaaataatcccatgcctgctgggcttatcaattcatcagaacctcttaattcaattttcttttttatatttaattctttcaacaagtttttgtagatacagtttacatcattatcttcaatatcataagatacatcaacaactagatttttaaatcttgtatactttataaatgtataaactgcaatgactatagttacaactaaccataaataagctacatacaacataagattattatctgtagaaatatcaatttgtgtaatattatttcctactgcattttctttgggttcttttacttcatacactattgtataattaaatagaaaaagtaacattctaaagactattatcaaccaaatataataattgaatctcttactaaacttcttaaataaatatcttttcaaaaataataatagacaaataccaagactacatacaatagttgtctttataagattttcaaaaacatatagcatataattattcatcctttaagttatcaaaataactttctagaaaatctagcttatctttacctatattttcatcatcatgtaatgctgaaattaagcttctcaaagagtcatcatgtatattacttaggaaatcctttgtctcaaaacttaaataatctttgtgttttactcttattgtgtaatgtgtatatctgtctattttttgagcatctaagaatcctctttttaccagcctagataaaagtgtcagtgtagtagtttgtttccagccatatttttgttccatagcttcaataacatcttttgatgtcactgtaacatctactttccaaatgaatttcattacttttagttctgcttgtggtatttttcttatcattatttacacctccctcaaaactcctgctaccttaattctacaacatgtgaattttttagtcaaacactttatgaaaaaaatgtgaatttttgtactttttgttaaatttctaatttttttacaatattaaaagttagattttaaaatatatctatttaaatattttactttttacatatttaattacaatagtgtagaatgttatttacacattaaaactatttaataaaaattcctatattttcacacaaggaatattataatacttttttttaaaataaactagagtaatatctaataaattttaataaccttctaaattatgcctttatgctattaaaacatctattttatactgattatttacaaatatatctaaattaattataaattttattgaataagacttttataattatacctttaataaattataaaaaagcacttttataaaaaaatgtgcttttaatatctactaataaagttctttattttaattaaaacataattatattttagtattataatcttttaattttagcattatagtttatgtattataccctaatatattttattttaaattactagttaatcactcttttctggttatttatctcctatatattaaagtgtcacacctaaatagttaaatcattatcctcttttatctttattgcctttacaaatccatctgcaattacaaaactcataagagaagttataaaatatacaaatactggaacagtaaaataaaatccaaatcctaaatctaggaatctcattccttttccagtagtaccaaaagttgaaataaactccattatagagtttaaaagcaaaagatatccaataatcctaaatctttttacattatcttttacaaataagctatgttcagaactacttaatacttctatcaatgattttataatgataaaatatgatacacctaaaataaacattaatattccagaaatagtgccttgtagagttgcttctccactaaaacagaggtacataaaacttttaaatcctcccacaacaattactaaccctaaaagaaaaaataaaatttgtaatataccacttagtaaattttttataagtttattaggcatcataccaactcctttaaaatattttatatatagtataatacattatattatatcgtttttcaataaaaatattataattaacaatatatttttattgttaattatgcaaataaaaaagagtataataaaagcctttaaaatacatttttttcttattttaaaggctttttatattctacatttttattttctatattatatcctttgataatcgttacatctaaaatagaacttattaccctaaatataagtatctttataactagaatagtccattacaacagcatctccagattaatccactgatacctctttattatcaatatctaaaattgaaattttacaattcccacccaatttttcttgaactattttagctaattcatttaaagcattttcaaattctttaaatctactttcatctactaattcaatgcataaaaaggcattgttagtatcttcagtaagcattgttctcactgcttcacgccaattccaacatctacaaattgctccaccatcatctttataaattatttctccttcatatggaaatgaattttcatctgtccctagtgggataaactcctcattaccaattgctctagttagcctaatatctcctataaatttatctatatcctcccctccacaaggtaatgcatattttaatgagataaaattgtagatatccactaaagggttaatagttcctatattatttccattatgaactctttttaataatgcttcaatagaagaccttgctccttttttcgttttaaattttttaaatgcctctctccatactttaatcacttggttgttgctaaattctgagtcctccaagtattttaatgcttcttcttctcccttcaaaattattttcttatagtcttcatcttttatagagttatctatatcattacaaataataactccaatttttgcactaggaaatagattccaaaatgcatcctcaataacaaattttttcattagaaaacctcctcaaatttaaaatatgtaaaaataaaaaagcctatagaaatattattaaatatctcccaggcttttatccttccgtgtacacaacaattgcgcgttttctcttggacctgaccattataaaatgcggaaccctagaaaactaaattataagttttttaatttacaaaatacaattaaattttagcataatatagcatttaaaacaatattctattatctagtttgtacattaaaacaatttgccattagattataattatggtggcaaatgggtggcaaatcaccttttttattacatttttgtttgtttaaactattgaaaatactatattcttacaattttaatcaatttctgatttaaatggagtgtcatcagcttttgctattctatactccttatcagttatataaccaagctgatgcatcttatacagtacaatcacttgtctcttcttagcctctccatggtcaatataccttgcaggattatttgtcataccagctaacatagcacactcagctaaatttaattcactaacttttttaccaaagtagacttcagctccctttgcagctccatatgcatttttacctagatacatattatttaaatatgcctcaagaatttcatccttagtcataatcttattcatctgcttagcattatacatatcccttattttccgcttcatagttttatcattactagtaagcaggttttttgaaacttgcatatctatagtacttgcaccttgtgttgtatctgtaaacacattgtttaatactgacctaactagagaaataacatctactcctttatgcttataaaatctctcatcttctatggaaactattgcatgttttaaatcatttggcatttgttttatacttacaacctcactacttatatatttagacctaattaactttttagtaacttctggtgacccttttatagctgaaactgtaaatattgcacctgccactgaaaatataattagtgcaactaacataatagataataatgccctaactattctaatccttttttgtttttttctttttttactttttaattttttctctctttgtttatactcgactcttcttctttctctttgattgtaatctgtatttaaaggtcttacattatctcttgtaaaactatctctatctctttttataagattctgtgaatctactttttcactcattcttttactggaacttgtattaggacttttattttttttatttgccgaagtataagaatgtttagattttttattactatctttgttgttactaatttttttacgtcttattttattattatcattatcattgtaataacccattttagtctcccttcttcatataaggtacattatacattgttctacaaaataaatcaaagaacaaaattgtaagcttaagggtcaattttataaaggatattttcactaattttctctatatttataattaatattcatcttttattttcaaaaatagttttgcagttgctaatgtatcactgtcagctctatgagcatttatattctctatgttgtaataagcacaagctgtttcaagtttcttgttttttcctttataacttttacatttttttaataattctactgtacatatataattgtttattggttctaaatctaacatcctaagatagtaatttaaaaattttaaatcaaatttcgcattgtgtgcaattatagttctatcacctatgtattttctaaatctaggtaaaactaattctagtggttcttcattttctaccatttcattacttatatgtgtcaattctgttataaatgaagaaattatccccttaggttttatcaaccttgaatagttttttacaatttgttcattttttatttctgttattcctatttctattatttcacaacctttatatggatctaatcctgtagtttctaaatccacaactacatattctttcatatctcttctccttattattaaatggatatatttatattctatatttatgtaatagactaatcaatacttaattttatatgatataggaagattttacaaattacaacatagatatatcctatattccatcataaataaagatttttttattagaataattaaacttttaatttattgttatttaatctattttgataaacattatttattttattattatttaaatctttaaaatctaaacttttacattgttcatcattttcccatattcctgcttgtttatttccatcatttttatataatacacccttaccatttttcttattatctaaaaaatatcccttataaatgtcattattgggatatgttaattttcccaaaccattttttaatccgtatttaaattcacctgtatatattgaaccatctctataagtatattttcctattccatgcatcttgtcatctttccataatccttcatacttttccttacttgaaaaaatatatattccaaatccatttttctttccatcaacaaactcacctttatataaatcaccattatcgtatttaaatactttttcttcctttaatttcttattgttactcttatttttattattattgttatcctttatatgtatttcttctcttctggcttcaataaaatctctatcatacctaaatccgtttcttgatttaattttttgattaatcttcttcttattaataaatactctagctagttgagtaaatataaatacagatgataagcatataaatacacatagtattgttgtaaaataactagttatattttccataaaaaatcaccctttaaaaaatttatttaaaatacctaatataatatatatttttattaaatgttatttatacttttatagtactatattgaataaaattaactttgaaattatttacattaaaataaatcaaatacaaatgccataaattaagtgtttctagttagcataaaaatacttataaagtatgctcaaatatttcaaataaatacttttattcaaataaatctctacttatataagtgcttatataaataaaaagatgaactatagtaaatatagttcatcttttttataatagtatttatttaaaattaatatttatttagttagtagcatctacttagatatcagataagaaagcacagtcatttacttataataagttcttttcatatattttttattataattattcttttacaagaacttttataatttctgaaatgtacatagtatgatagtctttctctggataccattttttatcattttctttagcatcaaagttttctggtggcatattaccatgatatagctttttacatactataatcatattagcttcttcaaaagctaccgtatcatccacaaaatatggtgtaagtcctgctttttctattttatttatatctctaccagaaatagtaccacaaatatttaaagcctctctatacgtttcatcaaagaaggcaactgtaaatgtatcattactatctacaaattcttttgtatatctctgtggtcttatgtaagttgtaacaacatttttaccccaatagactccaacaccaccccagctagcagtcattgtgttaaacttttctgaatcaccagctgttataagtaaccattctttgccaatcttagtaaatggattaaactgtagttcctcaatttttacttctctaaaacccatgacttcatcctacccttcattttttaattatataaattaattgttaaaaatttgaatatatgtactcttataatactgacttttgattgtcctacataattcatgtaaattataatacaacaaatcaattactttcgcaataagtagttttcatattttataagtgtaaaatatagataaaatatattgattataaagtatataatatatttttaaacctaaagcaatatacaataaaaaaatgtagaaagtaagtatctctctacattttttattatatattatttttatattaatttaattttatcttgattcagttttataaaaaattgttataattgtcaagttctactctattatttgtaatttcttatatcttgttaacaacatttaagttattacatttatttatatatattttttcattatctaagtcttcatcaaacatttttattatattttttatctcatacttgtactcatcttcattcattctataaagcattaaatcttctaatacatctttcatgtcgaggtacacatcttctaataaataaaaatagccttcctctatatctttcaatttatctatagtatccatttttttatttatatctttcataatttctaaattttgtatatttacatctatgattgttaataagtacattctcacagtttttattatttcaacagaaaaatctacaatattataatttccttcttttttatataatgactccttaaatttgttaaaacaattatctaaattagaatttatatcgttaaatggtggtcttattatgtcacgtattattaaaagattttgtatatctacattatttgtgattgcctcatccaaaataaataaattatatgcatcatttaatgggtcatgggcatctccactaaactctaagttaacaaattcaagtaaatttttcaatgatatatagttcatacatctcataccacaatttatatatttttcttttatatctacaaataaatctctaatattatttacaaaccttggatggttattttttttagcacttctcatatctgtgttattgaaacatgtcaaatccaaattaccaaaagtatatattcctttaatatcagaaaatatgccaagccattttttaaattttctcatgacctcttcataacttggtgcactcttcaattcttcagaagatatatgtgttaattcttgtatatgaggatataactcctcattacttactggtcttattaaagatttaaatttatcaatattttttgttttttcatcatacataactgctccgattgcaattatatcagaattaaatactgctctttttgatttagaatttggcatattcatttcaaaatctatatatactcttttcaatataaacaccctttccaattgtttatagtgattctttttaactatttttattcaaaattttctaagaaagaatgtttctccccatctttttgccaaccaagtactgaatcaagatttacattttctgctgccttaaatatagatttttctacatttttaaaatttgattctaagctctttattaagtcttttatctcatatcttttattacctgtttttttagcagcaaccatacatgcacaatttaatggccatataccactattttgaataaatcttataatatgttcttctcttatataataaagtggtcttataatttttataccttcaaaattagtagaattaagtttaggaagcattgttttaaaatttccagcacacaataagttaagcattgttgtctctattacatcatcataatgatgacctaatgcaagtttgttacaccctaattcttctgcctttgaatataatgctcctctcctcattcttgcacacatatagcatggataatcttttgctatttcatctgctatctcaaatattcttgaatcaaataaatgtattggtatatttagatactcacaattatctataagtaattgtcttatatttgcatggtatccagggtccatagcaataaattcaacatcaaaattaacttgtccatgtttttttaactcttgaaacattttagccataagaatactgtcttttccaccagaaatcgctacagctatcttatccccttcttcaaccaatttataatctcttattgacttcataaacttagaccataaattttttctatatttctttattatacttttttctatatctcttactggaagtctttcctcaaaaggaactataatttcacagccttttcctgatagttcactcatctaatcacctcgtatatttatgtatatttatgttaataatattttacaaaaaagtctaccttcatccacaaaatactataatttttactttaattttactaaataatttatagtttacaataacacataaacttataataacataaataacctctttcttttattatcttttttatttttctcatttaatattttattattagtaacgatttttaaatgattgaatattatacactagatagagttacctatctatttacaacaaggaggttttcatcttggaaaataagactagagatatcaaaaaaaattgtggtccatctttggctagaccatacattaataatcaaattttcacagaaatgtactgcctttctgatgcattaaaatttggaactatatttccagaactaaacttactagagtctgaaatgtacaacaaagaattatatgctaagccaaaaaaatatagaggaggtagaagataatgaaagactcatctagagctgaacttatgagaaaagttcaggaaacatcttttgcatgtgttgatatgaacttatatttagacaatcaccctgatgataaaaatgctatcaacacttataattcattatgtaatcaatttgcgcaagctagatatgcttacgaaaataaatacggtcctttaactaactttgggtatgctccaagtagatgcccttggcaatgggctgaccaaccttggccttgggacagagaatttaattattagacatcaagtattggaggattgaaaattcatgtggatatatcagaaaactatacaacacccagttaatataaaaacttgtgaccctagaatggctaaatttcttataactcaatttggtgggccaaatggagaacttgctgcatctttaagatatttaagccaaagatatacaatgcctactggtaatatgcgtgcacttttaacagatattggtacagaagagctagctcacgttgagcttatatgtactatggtttatcaattaacttctgatgcaagcccagaagagttaaaagctgcaggtcttggttcaaactatgctcaaaatggatatggaatttatccaacagattcaaatggtgttccatttgatgtaagacctatagcagttatgtcaaatcccgtaaccgacttacatgaggatatggcagctgaacaaaaagcacttgcaacttattatcaacttataaacctaacagatgacgttgatgttatagatgtattaaaattcttaggtcaaagagaaataattcactatcaaagatttggtgaagctttaatggatgcttacgagttagaagaatctcaaaaaatgttctaaaatttttatttgtataactattattatttgataatttataatttactgttgtgttaaaatttataaaaaatataaatataatttattttctataaacagagaaaataaataaaaagcaggtatcaatcaaatagtaacatgtattatactatacattactatcaatattgtacctgctttcatattataagcaataaagaaaaatctatttattaggttttataataaaacaattataaaactcttcttgcatttacatatctacttgaatagtagctactatttatattagatattgttactttttttgatgaacctgaagatgcatgtatcatatctccatttcctatgtatattccaacatgacttacagaaccattatttgaaccttgtgtatcaaagaatactaaatctccacttctaaggtctcctctatttacatatgttccatacttactttggtctctagatactcttggtatactaactcctgcagattttttcataacgtactgtgtgaatccagaacagtcaaaactatttggaccttctgctccccatacatatggttttccaagtagtgtctttgcaaaacttattacactatcagctccttgacttggagaattagtcgaataagatggaattgaagtatcaacagaacctttttcagcaaggtattgacttgacacatatccagtttgattgccataacttacttttgtccatcctccactttcagaaatacttccaacctcagtaccataacttaatgtagctattttagaatgacttgtacctggtcctgttctaacgttcaatgactttgctgttacaacctttgtaccctttacaaggtcatttgaactgttttcaacattttcatttgtagagtcatttacactagttcctaaatatttacttgaaacataacctactctaccattagaacttatttttgaccatccatttgactcagatatgtatccgacttcagtcccatatcctagtgttgatattttagaactacttgtacttggtcctgttctaaaatttaatccttttgctgttacaacttttgtcgacttaactgaagtatcactactttcattgctacttccaaggctatttattgctacataatttccatgcacataacctgtgtttccattatatttaacttttacccaagaaccttcttttcctacgtactcaactttatcacctttgtaaagtttccccattgattcatggtttgtacctggtccttttctaaaatttaccgcattccctgttattgttctgctttctatactcacactctctacttcagactcattagcatatgctaaattccccatagtaggcattattatcgcagttgccattatactggctgctattctcttttgattaaaattcataactttccactcatctcctcttttctactatctttatttcacttcaaaatataaaagaaataattgacactattaaaatatcaattatttcttttatattaatattattacaaatttgtaactatttgtctatagtaatatttgcttaccataaattaccatgtataaattttaatcttcaatagcctgtaatttagtaatatagccatcttttaccttttttaaaaatggctatattttttaacttttttgtaactttttaaaatccagttgagccaaacccaccttttcctctttcggagtcacttaattcttttacttcttctatgttaatatcatagataggttttactatcatttgagcaattttcatatgcttttcaaccttaaaatcatttttcccatgatttattaatataattttaagctctcctctgtatccttcgtcaatagttcctggtgtatttaatacagtaacagaatgctttaaggcaagcccacttctaggtcttacctgcgcttctgtcatagtaggaagctctatacatatcccagttttgataagtttagtctctccaggaggtattacaacctcttctatagaatacaaatccataccagcatcacctttgtgagcaaaattaggtattatagcatcatcatttaatttttttacttttaaattgtacatcttatatctcctttcaactttctataaatattataacttaaatttcgacctcttgaagttttttatttttttgtggtaatataattattagtgttttaaaggaggattttttatgaaacttgtacttgctgagaaaccatctgtggcaaaaactatagcatcatttttaggtgcaaagaccagacaagatggttactttgaaggaaatgattatataattacttatgcagttggacacttagtatcattatatgatatgaaggattatgataaagataaatactctggctcttggaaaatgaacaatttcccatttgttcctgaggataagtttaaatttaagattgatagttctaaaactaaacaattcaacactgtaaaaaagcttttgaatagaaaagatgtagaatatgtaataaatgccactgacaatgaccgagaaggagaacttatagcatttttaatatttttactggcaaaaaataaaaaaccagtaaaaagaatcttggtaaatgaatggacaccagaagatattacaagaggtataaaaaacctaaaagatgaatatgaaatgagaaatcttcaagctgctggatatactaggcttattactgactggttgattggaataaatttcacttctgttgctacattgaaatatggaaatgggaaactattaaacataggtagggtaattcttccaacagttaaattagtctatgatagagatatggaaatactaaactttgttcctaaaacttattatgaaatagaaggacattttaaagctgaagctggtgaatataaaggtaaatatgttaagggtaaagaaagtaaatttgatacacttgaagatgcaaataaaattatagcttcaattacatctgaaactggtaaaatactagataaaaaagttactatgtcaaaggaatatgcaccaaaactttttagtttgacatcacttcaaggatatataacttctaagtattccaattttacatctgataaggttttaaatgtctgtcaatctctctatgagggtaatggtaagggtggatacataacttaccctagaactgattccattttcttagaagaaagtttggcttcaaaagcttctcaaactttagataaattaaaggttggtcttgaatatgaaaataaaattaaattttctaaaactaaaagagtttttgattcttctaaagtagactcccatagtgctataattccaacttatataattccaaaaagtttatctaaggatgaacaattagtttatgatgccataaaagatagatttgtagcaaactttatgcctcctgctgaatatgagaatacagaaattaagactgaagtagataattgtactttcttaacaaaaggtaaagtgcttaaatcaaaaggataccttgaggtatataataaggaagaaaaaaacgatttacttccacttgtaaataaagatgatgttgtagatgtgttagaaataaaaccattaactaagcaaactactccacctaaaccatatactgaggacacccttttaaaggctatgaaaaattgtggtaaaaatgtgcctgaagaagatacaacagtgctatctggatattcgattggaacatcagccacacgtgctgatgtgttaaagaagataagtcaagtgggctatgtaaagaaaaaagggaaatcttattctataacagaccttgggaaaaatttagttgaaatttttcctgttaaagacttatttgatgtagattatactggaaaacttgaaaaaagtttaagcgatattcaaaaaggaaagtatacaagaaaagaatatcttactaatatcattagttttatatatcaaaatgtcaatattataaaacaagatgcttcaaaaaatataaacacagaagcatatactttcgattcaaaaactaaaaaatttactaaaacaaaagaaaaaaaacagaaaaaagatgtaactaatactgaaaaagaagttgctatatcaaaagattctaataacaaaaaagaagttaaaaatggtgatgaaaatcaatctcttggcaaatgccccatttgtcaaggtgatgtactagaatttgacaaaggctttgcttgtaaaaatcataaagaatgtaaatttgttatttggaaaaatgataagtatttaagtctttataaaaagaaagttaacaaaacaatggtcaaaaatattttaaaaaaaggtgaaactaaagtaaaatctttaactgctaaaaacggtaataaatttgatgctacattaaaatatgataaaaatccagataccggctatttcaattggaaaatagagtttgacaactaaatattcataagaaaagaaatagcagtagtataataatctatattatattactgctatttcttttcttatgaagttttaacttttttaatagtgacttttacaatcacactctaacctaatttctttactatttctgataactttaatgtatgttcatctaataaagttagttcctcttcagaaagattagataatttttttactagagattctttgagaatagcttttactgcatcaaataatttaaatgctttatctgttaattcaaccctaagaatccttctatcttttgggtcaggaaatttattgactaaaccatgttccactaatctgtcaataatcggagtcatatttgattttaaaattcctaaattagaagctatttgagaaattgatgatgaatttgatgtcataagataaagaattaccttagcatgtgatggagccattggacattcttcaaaataagctttcattatatcagagttattttgaaacttttttaacaaatcgctttctttaaatatattattttcaagcacaaataaaaaatctaaaaaagagtccgctattttaagtatattgttgttatccatatttgtaacatcccttcaatagataatataataaaacattgttgtttaatatagtataaattataaactattaataaatttaaaacaagaaaaagttattgactcataataattataaatttataatcaaattagagaattataaattgccaataaagggaagttttttaattagtctaaaactaaacttaaattataagacactttaaattctacaacaagctagtgtgcaatatataataggaggagatatgaaaagatatttaatagttttcttaatgtgtagttcactgtttttagttggatgtggaaaaacaaaagaatctgaacctgagaaaccaatagcagtttctgttcaaaaagcagtaggtggagaaattgaaaacacaaattctttctcaggaactacaaaagttaaagatgaaacagctgttactgcacagactgttggcacagttcaagaagtgtatgtaaaacttgggcaaaatgtaagaaaaggagatgaattattgagtataagcagtccagagctagaaaatagtgtaaagcaaagtaaagcctcactagatttagcaaaagcaagttattcaagtgccactggtggttcattagaggcacaagtaaatcaggcaaaaacagctcttgacaatgcaaagattcaatatgaggagtctcaaagaaattatgacaataataagattctttatgaacaggaagtcattagtttagaccaatttaaaaaaatagagttttctttagagcaaacaaaacaacagttagattctgctcaaagagcatacgatacagcaacttcaaaaagtatacctcaagctaaagcacttgctaaaaaacagcttgaccaagctcaagtatcatataatttagcaatgagtaatttagacaaattaacattaacatctccagtagatggtacaataacagctaaaaactttgattcaaaggaaatgataacacaatcacaaccagcttttattatttctaatcctaatatactagaagttgatttaaatgtagcagaatcagatataggtaaatttaagaaagatggaaatgtagatgttataattgaagaccaaaggattttaggaaaaatagattatgtaccttcagtagttgaccctcagacatctttatatcctgttaaagtacttgtaaataatgcaaacaacaaatttaaggcaggtatgtctgcacaagtaaacttaagtattgaaaaagaaaatggtgctgttacagtgcctaaaaaagcaatatttgaagaaaatggtaaaaaatatgtatacatagcaacaaaagacaatatagcaaagaaacacttggttcaaactggaattgtaacagaggataaaatagaaattaaaagtggtgtaagtgataaagatacagtgattattggaggaataagtcttatttctgacggaactaagatatttcctgtagaaaaggagaagtagactatgaatttaacacagacttccgttaaacgtcctctcacaatcataatggtctttttagtattaatagtttttggtggtattggatataaaaaaatgtcaataaatctaatgcctgatatagaaataccagttgtaatggtcatgactacttggacaggtgctggtcctcaagacgttgatgaacaagttagtcaaaaagttgatgaaagtttatctgccgtttcaaatgtaaaatctactatatcaagttcacaagaaagtgtttctatggtagttgctcagtttgaatttggaactaatttggatgaaataatgaatgatgttaggtctaaagttgatgcattacagaccagcctcccagatgatgcagcaaaaccaacagttttaaagctggatatgaatgcacaggctataggtcaacttgtcatatctggaggaaatgaaaatagttcacaagccttaagaaaatacgctgaagatgtaattcagcctaaaatagaatccatagatggtgttacttcagcagaccttaaaggtggagaaaaagcacaggttaatgtaatagctgacccagctgttctttcaaattatggagttagtttatccactataaaaggtgtcttatcctctagtaataaaacattcccttatggttcaattactcaaggtgaggataaaatagttttaagagcaattgataaattagaatccctagatgatataaaacagattcaaattcctgtaaaaggaggaaatacagttagattagataatctttgtagtgtagattatggatatgcagacaaagatagtatttatagatacaatggaaaagacagtttggtaatagatatttctaaacaacaagatgccaacactgtaaaagttatgcagagtgcatacaaatacgtagatgaattgaataaggaaaatcctcaatttaaaattaaaattgctaatgatacaagttcatacataagtgaatcaataaacagtgtaatgagcaacttgcttataagtgctgttatcgcatttattgtaatatttgctttcctaaaaagtgtaagagcttcactagttgttgcagttgcaataccaatttctataataggtgctatagcaattctctactttactggtgaaagtttaaatcttattactgcaagttcattggtaatttcagttggtatggttgttgataatgctacagttgtaattgaaaatatatttaaatataggaaaagtggcagattgagtcttgatgattgtgctattgagggaacaagaactgtaacaaatgcaatacttgcatcaacattgaccacgatagcaatattcttacctatcatgtttacagaaggtatagctaaaataacttttggggcattaggtaaaacactaatagcttcactagcattctcctttataggtgcaattacactcgttcctagtgtatttgcaaaattaagcagaggaaaaaatagtcaaaagatgcaagaaaaagatagtcctatatttgataaggtaagtgaagcatataaaaaattattaagtgtatgtttaagacatcaacgcttagttgtaatatcaagtttacttatttttgtagcttccttatttggaatgggatttataggtatggactttatgcctgcagcagacaagggtgaattatctatttctatagaacttccaaaaggtcttagcctagaatccaatgattactatgtatctatgactgagaaaaaagtctcagatattccagaaattaaaactttaataacaactttgacatcagattcaaataatagtaaagcaagtatagcaattgaattagaatctcaaaaaaatagaaaaagaactactgatgaaatagaaaaagagataattgatagagtggctactgtaccagattgtaaaataaatgtaagtcaaaacagtagtgttatgggtggagctggaggagcagacttcacattagaaatgaaaggtcctgatttagatgtattaaaaatactgggaaaagaagctgaaaaagaatttagctctataaaaggatttagaaatgttgaaacttctcttacagatacaacacaagaagctcaatttactatagataaacataaggctcaagaatatggtgtaaatactgctgaaattgcaggcatgttacgtacagcaataaatggtgactccgtaaccactgctactattgatgattacaaagtggatgtaaacctaaaatttaaagcagatactattgatagcttagaagatataaagcaactaaaagtaaactctgcaactggaaaagaagttcctcttggtgctttttcagatataaaaatggcagatggtctacaatctatatctaggactgatggagatttttctgtaaatataactgctacacttgacaatttagatgctggtactgctacaaaactagcactagaaaaaacgaataaaatggtaattcctaaagattactctataggtgttggtggtgaaacagaaatgatgaatgaatctatggcaagtcttggattttcaatggtcatagctatagcattagtttatatggtaatggtagctcagtttgaatcatttagtaaaccatttataatcatgttctgtgttccatttgcattcgttggagttgtgctttcgcttctagttagtggtcaaagtttaagtactgtcggtatgctaggtataatcttacttatcggtattgttgttaataatggtatagttcttattgactacatagagcaacttagaaaaacaaatcgtaacaatgatttaattggtttggtttcaattggttgtgcagcaagattaagaccagtcttaatgactacagcaacaacaattttaggtatgttgccaacagcactatctcttggtgaaggtggagaaactatgcaaccactagccatagttataatgggtggtctaactgtatctacacttataactttggtgcttatacctactatatacttaatatttgataaatgggaaaataagttttcagacaaaatgcctaaaatatttggtaagataacagataaaataggaagtataaaacgtaaaataataaagaaaccaaaattgaaagctaaagtttaaatagaatggagggtgattgtattgaataaaaaaatgagcaaaatagttgcaattggctgtggtgttggtataataactgccaatttaatcccagtttacgcagataataatacttcttctataaacaacgttgataattctattttaagtgactcaaataaaagaacatctgaaaaggaaattttgactgctagagaagctgttagtgctgcacttaaaaatagtgaaaaattaaaaatgaaatcagaagaaataaaaatgttaaaagaaaagttagaagtacaagatgagtttgatagttttactggaagtgacaactcgtttccatacgaccaaattggacttcttaaaaatcaaagtgaacaggctaaaggctttatggaggaccaaatagcaaatgatattactaataaatttaacgatttagtttcaagagaaaatgagctagataagataaaaaacaatcttgaaataaaaactaaagaaattaaagatatgaaattaaaaaaagatttagggttagtaacatctttagaaactgaatcagctgaacttgaacttcaaacactacaaaatactcaaaaagctaaacttcaagaactaaaaaacaatcaagactattttaagttattgactaatatagatttaaataattatcaattggataaagaatatagatttgaatcttttagagtaggtggctcagttgattcatatatggaaggtaaggttaatgaatatttaaaatacgaccaattgattttagaacgtacagaagaaagctttaatgataaagatgagaacaaagcagatttaccagatagacctaatcttacaagaccagttgctcctacaaaaccagagcaaggtaacctaactgatgatgaatacaaggttcttatggataagtatgaaaaagactacaagagatatgaaaaagaagttgaagcatacaatcttgaaagacagacttatgctgctggccttactacttatgcaaattatcttcaacaaaaatttaataccgaaaatggtctagtaacattagaagacagtaaaaaagctcttaaaaaagggttaattgatagctatgctcaattacttgctttagaagatacaattcagattactaaaaaacaacttgatttatcagaaaaacaattaaaaaatactaaattaagatatgatttaggattaattactctaactgattataaaaaacaagtggtaagtaatcaagatgctaaaaatagctatgacactcttattgtgaattataactcactaaaaaatggtatagaaaaaccttggatacttaatactggaaaataattctggtaaatagaaagattactttaacatacgtttgattaaaaaatagttatgcacactcgtggctttagtcatggaagattcagaaggcaaataatagaaatagattagtaaaaatatatttacttataaaactgtatacttttatagaggctatctcaaaattggatatgtccctgtcaagtagacagacttaaaaaaggctatctttatgcggaatgagttcgatattcaatcgaactcattccgttttttaattgtattctttcattattataaaaataaatataatcatttattagactaatcatttcctttggatctgtagtatcaattaaatatattaattcagatttaaaatgactgaaaaaactttctataggagcattatcccagcagttgccccttcgggacatagattgtataataccattatctttaagccttttagagtaagatctacttgtatattgtgaaccttgatctgtatgtaaaatacaatctttagctaaattcatatttattagttgatttactgttttattaactaatttagtatccatttttgtacttatctcatatgccactatttcaccattaaataaatctttggctacattcatgtataagaattttttaccgataggtatgtatgttatatccatacaaattttttctaatggttgattagctctaaattcacgatttaatatattatcatatacctcatatgatttaaacttacgtctatatactttctttctaataatagatttaattcctagttctttcatcaacctatatactttcttatgattaatagggctatcaagtattttatttaaataagtacaaattctttttctaccgtaagttcctctatattttttatgtatttcaattatataatccttaataattctatctttgatacccctatcggaagattttttagaataacttagccatttatagtaaccgcttcttgacacacctatcaacttacacatactagaaatactatacttcctagacataagtttaattgttttaaatttatcgcttactttgacttgtccaatagggtacttaacttttttaaaaattcattctccatgcgtaagtacttcaattcttcttcaacagatttaaattttctattatcattttctagactaatatttttaaatctgcctctagtttcctcattaaatgcagttttacctttatttttataatcttttacccagttttgaacttgtgttttgcttcttatattcagcatctcagcaattttgtatgatgagtatccttcttttatatataaatttacagcttttagtttaagttctttgctatattttttatgttttttagacatagaaaaacccccttagagtatacgctttttagacttattataatagccttttatttaaatgtctactataaggggattatactaaaatagagataagcctcttttttattgtttaaattataaaaatatatttgattccatacaaaaagagtgccttctgaactaaaaagttcattttgagacaccctcaaaagcttaactctaaatttaattattttttatcaaatgtctcatctattttacatcttaccatgttaacaaattcagaaatattatatcctctaagtttgcatccacatttaggacaataatccagtttcctagataccaaagccctacaactaggttctggacatcttatttttagactctcatctgctactttaaatccacatcgtgggcatatactacctggacgtgatgatacttcctttccacatttaggacactttgtcaactttatcccctccagtaaactcaatttaattgatagttgaaatttctctctacaataatatatgcaatataattaaatacgtttcacttacaactgtataagttaaatttttataataaaaatcccctatattcaatttacaaatacttaatttgatacattgaacaataggggattttatttttatttagttacatattttgcagtctattattatctaggattttttatagatgcttgagctgctgcaagtctagcaattggcactctaaatggtgaacaagatacatagttaagtcctacactataacagaactctactgaagatggttctcctccatgctctccacatattcctagttttaattctggtttaacttctctacctaatttagctcccatcttaactaacttaccaacaccattttggtctagtacttggaatgggtctttttctaatatttcttcatctacatattgacctaagaatttaccagcatcatctcttgaatatccaaatgccatttgagttaagtcattagtaccaaaactgaagaagtctgcttcttgtgctatttcatcagcagttaaacaagctctaggtatttctatcatagtacctacagtataaggaacttctataccttcttcttttattatagcgtcaacagtttctactatcatttttcttattatttttaactcatttacttctccaactaatggaaccattatctctggagaaactttaacacctgctttgattgcttctatagcaccttgtattatagctttagattgcattacacatatttcaggataagttattgcaagtctacaacctctgtgtccaagcattgggttaaactcatctaaatcaactattctcttcttaatatcacttacttttattcccatagattttgaaagttcttctatagtctcatcatcatgaggcaaaaattcatgtagtggtgggtctagtaatcttatattaactggttttccatccataactttaaataactctacaaaatcttctctttgcattggtaatattttttcaagagctttttctctttgttctactgtattagataatatcatttctctaactgctggcaatctagcttcatcaaagaacatatgctcagttctacatagacctataccttctgcaccaaactctatagctgcacgagcatctctaggattatctgcattagttctaaccatcatacatttgtgtttgtctacccagttcattaatttttcaaagtttccagttaaagatacttctgttttcttaacatctcctaggtacacatttcctgtagaaccatctatagaaatgtattcaccttcttttataactacatcatcaagtgctcttatttctttattaaactcatcaacttttatttctccacatccagcaacacaacatttacccatacctctagcaacaactgctgcatgtgatgtcattccacctctagctgtaaggattccttctgctttaaccattccttctatatcttctggagatgtctctaatctaactaaaactactttttctcctttttcatttgcttttactacatcatcagcattgaaataaactttaccacttgctgcacctggtgatgctggtaaaccttttgctataaccttggcttcttttaatgccttatcttcaaattttggatgtaataattggtctaattgattaggctcaattctcatgatagcttctttttcatcaattattccagcttcaactaaatcaaccgctacatttattgctgctgctgctgttctcttaccatttctagtttgtagtatatataatctttcattttctatagtaaactctatatcttgcatatctttataatgaccttcaagtatatgagtaatttttacaaattcatcgaatacagctggcattacatctgcaagagttgatatattttgaggagttcttatacctgcaacaacgtcttcaccttgtgcattcattaaaaattcaccaaataatttattttctcctgtagctggatttctagtaaatgcaacacctgtaccactagtttctcccatattaccaaataccattgattgaatatttactgctgttcctaagttatgagctatatcattcaatttacggtatacgattgcacgaggattattccatgatctaaatacagcctctattgcaagcattaattgctcttttgggtcttgtgggaaatcattttttatttcttttttataaattgctttaaattcttttactatttcttttaaatcatcagttgtaagttctgtatcaactgtgtatccctttgcttcttttactctgtctaatacattttcaaatttatattttggaacttccatagcaacatcagaaaacatttgtatgaatcttctgtaactatcatatgcaaatctttcattttgtgtagcctctgctaagccaacaacactattgtcattaagacctaggttaagaattgtatccatcattcctggcatagagaatactgcaccagaacgaactgatactaataatggattcttattgcatcctaatgttttatttaagtctttttctaaagtagctaaatgctcttctatttcttttattatctctgctcttatactttcattgttaacataataatcattacatgcttctgttgttatagtgaatccaggagggacaggtaagcctatcttagtcatttctgctaaattggcacctttacctcctagtaaagatttcatgtctttgcttccttcaccaaaactataaacatacttagtttccattgttaaatcccccattaatctttttattttaatttatatcatttttattaatagacattattaaatttctatttctttgtatatctttagaccattttctttcattatgtctaaaattatacctgctgtttcttctattgccttatttgaaacgtttattactgggcatccaattcttttcattatctcttctgaataatctaactcctgaagtattctttctaaattagcgtagtttgctttactggacaatcctaaagcttttaatctttgggttcttatctcattcagcttttcaggtgaattagtaagacctattatctttttagtatctatctcaaacacttctttaggaattggtatttctggaactaatggaacattagctacttttatatttttattagctaaatacatactcaaaggagttttagatgttcttgatattcccactaaaattatgtctgcttgaagaacacctctagggtcttttccatcatcatatttcactgcaaattctatagcttcaactctcttaaagtaagattcatctaattttctaattataccagcttctcttttaggttttcttcctgttctcttgcttatttctcttagtatatctgtcattaaatctatacaactaagaccttctctttcgcaatatctttcaacaatactgcataattcttcatcaactaatgtatatacaattaaagcgttttcagcttttgcattctccaaagtttcaagtagtactcctttattaatcatgtatggaaatctttttatttcataagtttcattcacataaaactgagacatacatgcctttgcaacttgttgtgcagtctcccctactgaatctgatactgcatatataattaggtttttcaccagcatacctccttaattgtcaactatttctaagaatagcttagttatgttggtttttgatattctcccaacaactctcatatgatttttgtcttctcccttatattcaacaatcggaatcgaatctacttcatgttctattatttttcttgaagctaataaaacacttgctcctttagttaaagtgactacatttggagttcttgtcattatcatacctattggcattttatttatatcagaacctcctatagttgcttttagcaagtcttttctggaaacaactccacataactcttcattctcatctataataactatactccctacatcagataaaaacatagtgactattacatcatatatactttcatccttcttagctagtacaggcatgctcattatatcctctactgttttttcttttacacttttaccaattaaatttatttcactaactcctgaataaaaatatccaacttttggtcttgcgtctaatattcctgtcattgttaatatagctaaatcagatctaagtgtagcacgagtcacattcaagctggaggcaatactttcactcgttattggttcattttccttaactatatctataatttttagttgtctttcattaagctgaataataatcaccttctttcattgtgctatactttttatcttttcgcatcttatatagtatattatataactatatataccattctgtaaacagattttttattgaatacgatatattttttactaagttctctcgcttaaagatatttattatatattaatgggggatatttctttaattaatagaactatattagtattacagttaatattataatacataattggtcattttaattcattttatattaaaatttttaataatattgtttcaatgtgaatataaaattgcagaactaattcaaaataatttttacgactacaaataacctataatatacttttaaagaaagtatcctaacaagaatatataaaaatttaaaagggttgatttaaaaataaccatcaaccctttttactaatatctatttatattaccatcaaatcttacccaaatattttttcttgcaattgtcttaaatgatataaagtagtatctttttctatctctaccatatcgtaagttataacttcaccttttttaatatcttttacaactttagtctttttacttatcaaaccaataggtacagcattcatagcctttgctacatcgtatttttctatagtaccatagcatgtatatgctccataaccatccataaactcaccttttttcaaatctttcttagctatagtcataacttctgctactagtccagctttaggtactattgtagccttatggtctaagactgccatagctgctgataaaggagtctctaaactacataaatgatatggtctatataatatgtaattaggtccatcacccatacttaaatattttagttcatcattaactgcttttaatttatgggctactactacgaaaactccaggtgctataccatttacaaaatcaactacaccataattatctaatactccaccttcgctttttaatgcatatttcttaggtacttcattaactgtagcttcaataccatgaccacctcttacatcaggcacaaatccagttgcattacacattaaagccatttctaccattgttttagttccttctttaaaagaagctatcatatgaggtgaagctccttttctttctgcttcttctctaactgtatcaggattacaatctaaatctaatttattatttttacctttacctatcactctaacttcaaaccccattgcatctgcaaaatcaaataattccattactgcacctggctcatctcctgcagaacctgtaaatatcactccagcatcatctgctaattttttaagtattggtccaacaacacaatcagtttcagcatttaacataactatatgttttttatttaaaatagagtttaatgctatctctgcaccaattgcaatacccccagttgcatctataactacatctattgacttagttttacaagccacaagaaagtcattacatgtcaatacttttccttcttgtaattttatttctgcatccttttcatttgttacattatctataatttcttcatctattcctgcatcagtaaaagctttatgagccaactccaaatttatatctacaacaatagaagcttcaatacctttcatatttgccatttggcttaccattccatttcccatatgcccagctcctataagagctacttttatttttttaccttcctcttccaattttgcaagttttctgtttaaatctaacataccaattcctcctgttataataattttattttcaaattaagaaatagttattaaatctccaatagttatatctggatttcctatttccacatgtatttctcctggtaaatttacttcacattttccatcaaatttgattgtacaatgcccaatttctctaagagtcttctgagcaatatcaccaactgaaactatacaataatctctattccctatagtaagtgtatctcctatttcaacatcactttttaatgttgctatcgaatgaattacagatatatcctttaagtcgtcatcattaatggtttcatcatatataataagacaattgctttcatccattaactctttaactaaactgcctatcccacttatcttaacttcatatttcatgacattcctcctgataatttatatttatattgagttaattaaaagaaacatttattttttcttttataaattttatagcttgtacaatactctcttcatctttaaatttttgctctgcactatatatatctaatccttctatttcttcaatctctttaaatttagccattactgtacgcccttttaaaatttctccaaactttataaacccatctgaatctgaagatataatggctatacttcctttagaaaaatagcttttctttttgcctgtagacactatatcacccttttttttagctctatttaaagttttaaaatacaatttattctgcttcattataaatatagtatttaaaatataagcaacaaataaaattactaataatttcatatttatacaccttccaaaaatcacattatttttaaatctgtataacaactataaatgctgtacaatagttatataaggtttttaagtaacacctttttaaattctaaaaaagttctacatttacttatcttattcgttaattttacatcttggcctatctttaaaacttcttcataaatttttactaataagtctgagtctatcttattctcacatggaaacattgtcataagaattatttttatacttctatttgcatattctattggttcttctaaaattccaactgccattaaaaacttatctgatttttcatttacagagtgaggaaataataaacctttatcaaatactgtgggagatttttcttctctattgactatattttttctaaacttatcatcaatacatcccaaatccataagatggtccatcattttttctaatgaagcaagtatagtcttttcatttaatatcataaatttatcttcatctaacaaattatttattagtaaatttgtagaattagtagtgtcaatattcccttctcttaggcacaatactgtttttaattgttctcttaatttgttttcatcaaatattgtatttatttttaatactattgtatttatattcgatgtgtctaaatcaatagttgtaaaaactatatcgtattcatctaagttaatatttctcaaattaaaacttgaaagagtatcaattttaggattatttcctatcagtttttctactcttattttcaatagttttgctgttcctagacctgtactacatataattgctattttttttattgaatagaatctactgctatttctttctaaatatccactgaaatggattgctatatatccaatctcatcttctgaaacttctaagttatactttttctctattacttttcctgctatttgtgctaatttaaatggaagtatataattttgcttaatctcttctaacaaaacattttttaactttatattaaataatagcctgtttaaagtaaaactaagatgatatcctagacctactcttaattcatcctcatttataaaaatacccatatcgacatatatttgattaaatatattttccatcaactcatcaatgtttttactaattctactactatttaaagcacattctgatgctggtgcatttccactaactaatggtatagttaaataaataatttcttcatcatttaaagtacattcaaacattcctgatattatatgttttatttccctagcaataaagtattcatcatatgatttaagtaaatcaaactttacatcatagtcttttactttcttttcttcttttactctatagactaaaactactatgtagttaataacttctcttaacatttcatctgtaacataaaaattattttctttaaataaagtcaatagtttttcttctaaatttatgatttcttcttttttgattcctttaaaatactttgaattactgaaatctttccttgagtttttatacaactgatttaatataaacagtctaatatcaagttcatttccatttaatttcatacctgtattctgttttttaatcaagtttaaattatatgaagccaaaactttttctacatactggaaatcatttactaaagtagttcttcctacacacatctcatcagctaaactatcaagtgtaataaatccatctagttctatcaagtaatttagtataaactctactctatcttcttttgaatttaatgaaaatacattttttctattcatatcaataatcttattgagtatctgctcatcttttatttctagtttatagccttgaccctttatatatttgattactgctatatcattacctaaatctttattcaattgttttatatacgtccttacacttctagttgtgacattcaattcatttgctattgaattaatactcacaaactcttttttactacacataatcaatatcttaaatatcttgcggtcaatagaaggaattttctcagttacactcattttgtatctcctccttgatttcattctagtacaaatttgaaaccaaattaatacataaaatttcactttaataaaggaaaatttagtattaatctaactcgataattacagctaattaatagtataaaagctagtctttcattaacaaaaaatcttgactagcttaaatttatatttacaattttattaattaattccaagccttatattgacattaaatattatctcaatgcaaatactgcaactccatatgcaataataacagctattggaccagttattaaacgagagtaaaataaagctggaacaccatactctacagtttctggttctgcttctcccaaacttaatcctactggtacaaaatcacatccagcttgcccatttattgcaaataaagctggaagtgctaaatatgctggtattgcaccaagaccaatttgtgtacctacaagagtccctactacttgagctataactgcaccaggtcctagtattggtgataagaatggaagtgtgcaaattactgatataatcaataatccaccaatattacctgcaagtggagatataactcttgcaatccagtctcccagtccagatgctaaaataattcccataagcatacttacaaatgccataaatggtattacgttattcattaccatttggatagtgtctcgacctgcatcataaaattttgatactacttgccctgccccttgaccaatagaaagtattatgttctttttagcatattcaccttgtgcttttgacttaacctcatcataattatcaggctttctaatagaactcttattttcgcttttattttcttgagatttttgtggcatatcttccccatctacaacacttatacagttaggattaacatctgatacataatattcttctgttataaattttgctaaaggacctgtttttccaactggatttacatttattgtaggtatttttttctttggataaactccacatctagcagttccaccacaatcaataataactactgctacttcttcatcagaaactccagttttaaatccatctacaatttcacaacccagtagttcttttatttttaatgttacttcatggataccaccagcagtcattgatagtatcttatttctattcccttctttttttatatacaaaggacctccccagcctgaagttcccttttctatttttaatattttattctcctccattttatctacctcctaagccttatttgttgctctattttttcttgttagaaaagcatacattttttctgttactatacctcttataaaaattacaattagaccaactataaaataccacaatgccagtgtagtagtttctttacctaaagtagtcaaacctgctgatattcccaaccatacaaaaagttctcctgcatttgcatgtggaaaaagacctgtaattggatgtacaaatgaaactgctgcatcataaaatcctgctttgtgctcttcttttaaaaatctaccaaatgtatagcacataggatttcccaagaaaaatactgatactaatggaagtagaatatatcttgtaaaagagttctttcctagcttagaagcccaattattaactctttcctcaccaattatcttaatcaaagagttaatagctaccattaatacaattagcgttggaagagtacctgaaacaagacctataaattgttctccccctttctgaaacaaaccgataaaccactctgcacctttacttagacctgtaataacgttttccataaaattataacctccctataatatctttaaatttttaattttactgcttaacataaattttacaaattacatcttttttctgtactatatgctaatattgtaaatgtttttttattaatatcattttaatataatatttttgataaataaatacatcttttttcaattttataaaggaaaaaattgtactaattagaattttcagaaatatacaattcttatttcgactatattctaaattcttcttagaaatttaagaacttatttttatttcttttattattaaaattatctaaatctgataaaaataaaaaatagatgctcttttacgaacatctatttcttaatcaaattatcttttagttttcttatagattattttataggtatataaatatcaatttgtgagttcacattactaggacctaaaaatcgttcatcatatacttcaaaatcatctcttatatccagttcttcttttgaacttaaaaaccaagtaccccatatatattcataagttttgtctaagttatctaagctaccagtatgagtaaatatagcatactttccttccttaatagtttttgaaacaaatgaatttggaatcacatcataactattaacttcaagtcctattatctcattaaattccatactttcactaactaggtgtatttcagagattgcttcacagattccaaaaactctctttgatggcaaagtatttgggacaatatgatgtacttttctgaatttctcccacaagtcaggtaatgaattattttctaaaattactttatcctttatacctattacctttattttttctatttcttttataactggtttaatcgttatatttccaacaagatgtctcataaaatctaactctaattttttctttttaccaacaaatacatcaattctattttttctatattctatagggctaaccttgtatatagatttaaatgctctgctaaatgcttccgaagattcaaatccactaccaatagctatatctatcacttttttatcactatataaaagttcttttgtactacttactaatcgtcttttttttatataacttcctacactctcaccaaacatagacttaaataagcgtgttaaatgataataagaatatccagtttcttttgccacatcatttacagttatattttcatgtaaattattctcaatatacattacagctttttcaaaatactttaagtaatccaatatggcacctctcttctacttaaactctttaaatatgtaaaatagcactattttttactatactaaaatattataactaattcaatacgataaataaaaacttttagttgatttatatagcctaattatttagaataattaaatacattttttattcaatgaaatcaaaaaagtcagatggtgctttttcaatatttatgtttatcctctgtgttatagatttaatgtcattttttaaatagtagctctcccatttattctctagtccaccccataaaatattaaactttcctatatttaaatccataactatactttttaaagttccaaaaaaatcattatagtaattacaagataagccatttggatactttaaagacaataaattcattaactctttctctccaatttttttagccttatttatatattctttaattaatttatatctatgaatagaatttttcattgattgtggttctaatttatgaagtttatcaatatgtgtatgattagtagagtgtaaaaaatattctctcttactttctaaactgttgattatatttacttcttttttcccatctaaagtctccacaagtgcaatgtttccagacttatctgcaagcaataaattaatattgtatgcaattggcatatcttttaaatattctaatgcttcatctacatctttgcaattttctaacaaatatctaataacagcccaaaactgtaaacctacaattgctggttttctcaaaccatctgaattgcctacaggaataccacatgatgactgacttacacctaatccacattcattcataccttcacctcttccaaattgcataacggtagtacctatatgtgcatattttccatttactttagttttacataaaacaaaatcctccatattgtgtgagaaatcgaaattacgtgcaaatagtacatgcccattttcagttaattctggtgttaatgcaacttgactacaacctggtttaagataagtcatagtataatataaaatttgattacaattcacttgaattgcatcagcaaaaccttgcaattcttcattaagacctggacaatatttatcaaacaactctatcatctctttttcttcttttttgcttaccagattagatttattaatctgaccttctattatctctggcatattagcaaccaattctcctagtctgtatcctatctcataatttgtaccactcaattcaatatttcttacttctaaagtttccatatgtacccctcctatatatcttataatcgattttatcattcgaattgtaatcattcatgatattttgtgctacaagttaaaaaaggttatataaaaacagataagcctctttttcattgttaaaataataaaaatatatttaatttcatgcaaaaaagagtgtctcataaactaaaaagttcattttgagacactcttcttattttaaagagtataattaaaaatagtctaagttctactcttccttcatttttttcaataactctggattttcaaataaattaaatcctgttaaagctaatatttttataccatcaattactctatcttttgcatatgaatttatagaagcctccaaaaattcttttgtatgtagttcttctccattttcagaaaacttcatcaaaggatgtatacatggcattatttgacttaaatttcccatatctgttgaacctaacattacttgttcatcttcatatattccaaattcctccataatctttgtaaatatgtctaccaaaactttattttcatttaatccttggcaagttggttcaaagtgataaaattcaagttcacatccagtggctattgcagcacctctagcacaatttttcactttttctactacttcatcaaagtaattttgttcttttgcccttatctctaatcttacttttcccatatcaggtattacatttgcagcagttcctgcttctagtataataccatgtattctcgttccatctactaattgttgtcttagtgcatttatattattatatagtagtactactgcatctaaagcatttattccgttatatggcttagctcctgcatgagatgcttttccagtaaatatgaaatctagacctcctattgctataatttcaggtgttacacaagtttttgaatttggatgtatcatcattgctgcatcatagccatcaaatacaccatgttctatcaagtaaggctttccatctccagtttcttcagcaggtgttccaattatacttacttctcccttgtaagtatccagtatacttgaaagagctattccagctccaactcccatagatgcaattaaatgatgtccacatgcatgtccattgcctggaagagcatcatattctgctataaatgctattttaggaccatctccatttttcttggttgctttaaaagctgtagccatacctgccaagttttcctcaacatcaaaaccctcttctcttagaaattctgatatttttttagcagatttatattcttgcaaagcaatttctggttcatcatataaagattgacatagccctagaattttttctttctttgaatcagccacttgtattattctttctttcataccaatcttacctcccactaaatttatttagtaatttttatattttattataactttaatttaactcatgcttatcctcttttaagtatctattttcccaaaactcagcatttcttatatctaattctataggattaaaagttctatcgctcctttttactcccatctttttctgcctttgataatcgtaatatgcttttatagctggtttttttagtgtaaatataccaactaagtttatatatgttaatacacctatacatatatcaccaagtgcccaacttgtaagtggttctataaagcaacacattgctgcacatattataagcataaatctacagacattaattatgtgcttttcatgtttttctgccttaattctagtcactaagtaagatacgttggtctccatcatgtatgagaaggctaataatgttgtaaatgtaaatagtagtaaaactattgctataaaaatatcacctaattgaggatgtaatgtatttattgcactctgtacatattgtggacctggttctacacctggtaatgttgtgtaaacatctgtaacattatacattcctgttattataatcataatacctgtagccatacatattaatagtgtgtctacataaacagaaaaagcttggactaatccttgtttggctgggtgactcacttctgctgctgctgcaccataagttccagaaccttctcccgcttcatttgagtatatacctctttttactccccaagatattgctgaacctaacatccctccaaaaaccgaaccaaatccaaatgcagatttaaacattgtcataatagctcctggaactagatttatatttgctatgattattaccaatgtcataataaggtatgctccacccattataggtactactttctcagcaaataaaccaattcttttaattcctccaaaaattattatacctagtgcaatagaagatgtaactgctattgtcatttttgaaaatccaaatgcttgattcattgctagatatagagtatttgattgtgtgccaggcataaaaaatgtataacttatgattgcaaccactgaaaataaaattgaacattttttccaaccaagacctttttcaaagtaatatggaggacctcccctgtactgtccatcatgctcatctttatatatctgagctaaagtagattctacaaatgcagttgccgaccctaatgtagccattatgcacatccacactaatgctcctggccctcccattgctatcgctacagctacaccagctatatttccagttcctatccttcctgccatagatgtagcaaaaccttggaacgaagatattccaacatgagagctatctccttcaagcaaaagagtaaacatttcttttacatcttttatttgaaaaaatcttaatttcattgaaaaatataatcctatacacaaacacattgcaactaatacaggtgaccaaacaattccattaatggtgttaactaaatcggtcacttaactcaccaccattcattttatatttatagacaataatttaaatagctatgtttcaacattctatataatcttcaactcaatatatctaaaaaatctatcttctatttatattatttttaatccacaagctataagtatctatctctaaaacaaagaatattaatcgatatataaacgtaaatttataaactttttaacgatatgtatttgacaaataatcaaacaatataaattggaatacatgtaatgaaaagcctgaaactgttactatataaatagtaccatatacaattattaatatataattgaatagtatatagttagattttaaattttcgtatttattatgaggtgtaaaattgagtacaattaccacctatttttgaaattcttttaatttaaattaaataggtttatgtaaatatataaatagatgataattgctactcaattccagacctttaggggtaactttatactaaaacctagaaaacttgataacattttggtgtgttgcactttaaattttaagtattgctataaaacttaataatttggtatttttacaatatttatgcttctaacttactttctcttttcttcttaacttttaatatatataaacaagatagtataccaattattagaattgctatctggaatataaatgtatatgtgtaacctttattgccataagtatctatccagtgtcctattaatgcaaattggaatacatctggtgaaaatcctaaagctgcagctatacctatagtagttgctgaatatttaactggaacttttacttcatcttgaactgcatagtatataccttttcccatgtaacctaatatacctactacaaatgttaaagctataaagatagtcattggagtagatgcaggtagtactaggaataaaattattactgctataccaaatacatatattggtagtagtacttttgtaggtgattttactttatctgcacaatatcctccaaatggtgctccaaacaattttagaccatgttgtcttattattgctaatgccccagacaatgccacagaacctccaagtactgatgttatatatggtgtaaaataagacattgtaactgtgaatgaatatacacagaatatgcttattcctactagccaagtgtttggtgattttagtactgtcataaaatcgccagcagacattttttcacttgcttcttcttctttgtcttctctgatatctacatctttaattacaaaccataatactggacacatcactattgataatattcctaaagatatcattacccatctcatacccaatacaggagttgaaaagcatgtataaatatataagaatattgctcccattactacgccagaaactccaaccatagcttcattgaatccataaactttaccttgattatcttttcctataactctaagtatttttaccatagaaggatagttcataactaatgatgtgattgcacaacctacccaagtagcaactgcaaatggatagttcatattaaatgcaaataaaaatgatactactccattaagaaatacagaacctaaaattatctttctataatcaaatctatctgctaaccagcctcctataggagctccaaatatattacctaacccataaattgtaagtagaaaacctagttgagtgtttgtacattctaatgcttttaggattggatcatataatgtatattggataaatggtataatataaactaattcccaagatattgctataataacaagttgaaacattaactttccaaactttataccgttttctttttctcccatatttaaaccctcactttttatatttattcacaagcataattgagttctttttttataacttctgcaagtatctcaacacctttaacgatttgttcttctgacattgttgtatagttaagtctcatagtattttttggaccattatttgcaaagaaggactctccagaaacataagcaactccagcatcaatggctttatccaataaatcatctacatttatactttcaggaagttcaacccatataaacattcctccatctggttctgtatatttagcttcctctgggaaatgtttcttcatagcatctaacattagcagacatcttttcttatactctgctcttattttttctatatgttcatttaagttgtatttctttaaaaattctattacttgtacttgcgaaaattgatttgactgtaaatctataccttgttttaaaagttctgccttatctatgatgtctacattaccacacatccaagcaactctaaaccctggacataatacttttgaaaatgaacctaagtataatactttatctttagtatcaagagatttaagtgtaggtagaggctctggtgtaaatcttatttctccataaggattatcttctattactatgacatcatacttattcacgacttccataaaatcttttcttctttgtaaagaccatgtttttcctgtaggattttgaaatgttggtattacatagattacctttatgttagaattttcagataataatttatctaaatcatctgttaccattccttcatcatcagtatctactcctaaaaaatcacattcataaggtctaaatgcatttattgcacctaagtaacttggattttctgtaactactatatctcctttttctagtaaaatcatagcacttaatgctatcccttgttgtgacccagtagttattataatattttctgcttttgtatcaatattttcttcttctttcattctttttactaatagatctaacaactcatcttcacctttagtaggtccatatgctagggcaaattttcccctttcattaagtactttttgagttatttcacttatctcttctattggaaataaatttgggtcaggaagccctgcagcaaaagatataacagttccaccacttgccaccttctgagctattttcttttgagaagctcttatagctgaagcttttaccatatccattctttttgcatatttcataatactttctcctccttaataataatttcttattgtgatgctaggcacgctaatgctattgaatttatttttatttcagctgtgtcagaacgtgaacctaaaattatcggatttgttgctcctaaaactatacctgcccacttagctttattaaatctaagccatgactttcctaatatattccctgcttctatatttggaaatactaataaatcaacatcaccagcaatattacttttaatacctttatgttctgctgcatgtgcatcaaatgctacatcaaatgctattggaccttccactatacactttggtatttctcccgatttttccatctctacaagtaggttggcatccactgtagattgtatcttagggtctaccatttcatttgcagtaagtatcgcagttttaggattttccatgcctatacttttcatagtaagaagtgcatttgtcattatatcttttttttgatttaagtttggcgatacatttattccactatcagtacaataaagaagtttatgatattgaggtaattcatatactgcaagcaaacttaataatcttcctgttctaagacccgtttctttatttaatatagctctcatatagacacttgtatttactaatcccttcataagaactttagcttccttatttttaactatctctacagcttttttaactgattcatcgggattttgacaacctattatttcatgaccttttaatccaatttctcttgatatactttctattttatccttgtctcctacaagaattggctttataatgtttaaatctgttgctgatttcacagcctttaatacttctttgtcttctgcaacagcaacacttacaataacaggttcaagctttttagcctcttctaataaattattaaaatcttttaacatactctttctcctaaatattaataagtttttgctatttcttctccattaagtactctaagtgctcctagagcaagtgcctccatttccatctctcctggtactatctctattggagctagatatgaaactttttctgctactcctttgactaccatttctgagtgagatatccctcctgtcaagataactctatctacattccctgaaagtgaagctccatacatagaaatttcttttgctacttgataaataaatgcatccattataagttttgccttttcatcaccctccttgattctgttttcaatttctatcatgtcctttgttcctaaataatcgtacattcccccaatcgaacttacttttgcgaccatttcatcatgagtatattttccggagtaacacaattctataagaggatatgcaagtaatccaccactcctttctggagaaaatggaccatcagacctaccaccacttccatcaatcattttgccttgtttatgtgctacaatcgatattcctgaacctaaatgagctacaataaagttataatcctcgtattttccccctagtttttgtgcaatttttcttgaaacagctttatggtttaatgcatgtaaccaacttgctttttctatgtctgatattcctgtaatcctcgatacatcatcaaattcatctacagaaactgggtctactacaaatgattgtactcctatttcatcagctatagttttagctaataatgcacctaaatttgatgcatgttccccatttatttcatttctcatatcctcaatcatttcttcactcacagtataggtaccaccttttatagccttcataagtccaccacgaccaactactgcgtcaaaagaatttatactatgattctcactacttaaaatatctactatcagttgttttctataatcatattcatcaaatactttagaaaaattttttaaatcttctcttgtatgggttatattttttttcaaaatttcattttcatcttggaaaacagaaatttttgtggatgtaccaccaggatttattactaaaactttcaatttaacaccccctagttctactatacagaacgtcgttcttgtattccggcctaaagacttcgtcctattgtccagaacgacgttctatattttattaattaaatactaacatataaaaataagtatttcaataattattttaaatatttaaaatattcattcgtagtcgtatcctgcttcaaatgcttctacatttttagaattgaatttacctttgccttgattttcaaagtattcacacataccactttcaaattcttcttttgtaaataaatccaaactctttaccatagcacctaacatgcaaatgttagcagctttttcattgcctaaattttgtgctatttcagtaacaggtacttttataacattaatgtcttctctgtactttctatccttacttactagtgattcattgacaaacatataaccattttttttcattaaactttcatacttatctactgatacgctgttcattcccaatagtatatctggattttttacacaaggatttgcaattttttcatcacttacaacaacattgcaatttgcacttcctcccctcatctcatttccataagatgggaaccatgtaattttcttttctgccttatatgcaacatacattataatttttcctgctgtaagaactccctgtcctccaaaaccagcacatataatttcattcaacatattatttcctccctaatcaataaattctccaagtggatactttggaacaagttcattttcaattctcttcatagcatctactggctttaatccccagtttgttggacatggtacaagcacttctattaagcaaaaacctttcttttctttttgtttttctagagcttttttgatgtatctttttgttgtatttatttctttagggttagttattgttcctcttgctagatatgctatatctaaatttcccataacttttacaacatcaaatgttgaaccatgatctgcgtaatttctacccgctggagtagaagctgtatattgaccttctatagtagttggagccatttgccctcctgtcattgcaaacatattattgttcataacaaggaatataacattatcatttctagtagcagctgacatagtttccccaagccctatcgcataagctccaccatctccagctattgtaaatatatatttatctggtctaactcttttcatagctgccattgctgcacccattttaccatgaggtggaacgacaacatctacattcatactaaattgaaacatatgattacaacctatatctgaacatataattgtatcttgacatatatccatttctgttaatacttctccaataattctatcgactatagagtgtccacagcctccacaaaacatattttcacacatcattattgctggtgctttcttagccataattaaaatacctcctcttgcttagcttttccatctataatctgttgagcaaaatctattaattgatttacttctgccatatattgagctgttgctactgaatatactggaaatctattatcacatgctataattacatcttccttcatctgtgccatcatgttcatttcaactgttacaagtcccttcaatgaatcacttaatttcttaaatgcttttcttgggtaaggccacaatgtttttggtcttattagacctaatttcattccttttgctctagcatctctaactgcaccttctgctattcttgatgaaataccgtatgccacaaataccacttcagcatcttctatttctatctcttcccatctttgttcatcttcttgaacttttctcattttttctatataccctttttgccatgtatcttggtcttcaaaatatgttatatcagttattactttatttttttctcctacaggtgttccttttgcagcccatggagctttatccatatcgtattctttcattggtggtgctatacaaggttctaccatttgacctattgtagcatcagaaagtataagtactggatgcatatatttttcagccaattcaaaagattcatatgccatatccatattttcttgaacactgttaggcgctaacacgattaaatgataatctccatttccaccgccttttactgcttgccaataattatcttgaccagctcctataaatccatcacctataccatatctttgcacacatgctacaactgctggcaaaccagctgatacccaatatgcaataccttcttgttttaatgaaaatcctggaccagatgaagaagtcatagctcttgctccaagtgcacttgctcccataaccatatttacactggctatttctgattcaccttggataaatactcctccaacttctttttgtctccatgccatcatttctaatatttctgattgtggtgttattggataacctgcataaaatctgcagccaccacgtatagcaccttctgctaaagcttcatttcctttaattaataaactttgcataccttttctcccctctaataaaaataatttataatatctcaaatactaaatcagggcacattgtataacaagcgccacattgaatacatttttcttcatcgactttaatagttacaaagccttttttatttgtgtagtcagaaagacttattgcatcttttttgcaagcttcaatacaaagatagcatcccttacatctttcaacactcaacttgactttttccatttctcaaatctcccctttatgtaatatttttacttaattttaaatatataatatttatattttgtataaatactatatatgcatcaattttgttctatagtatagaaccttgttctatttttattgcttaattaaaagataacacattcgcttatatatttcaataacattttaaattttaagaatatttaattttagattaaagaaaaataggctacatttaaactgatatttacaaataacaatttaaatatagcctatttttattatcgagattaaaaatcatctaaaaagttcagatatactttttgcagtttctataactcttttaatcttatactcaaagtccccttctctcattcttatagttggacctgacaaacttatggctgcaatagctttattatttttatctaagataggtgctccaatacaagttagtccatgttctagttcttcatcatctatagcatatccttgttcttttatttttgctaaaaaaagcatcatatcatcccaattatcaattgtatgttctgtatacttgtgtattggtgtttttctatatttttcaaaatctatagaatcattaaatgccataagacatttaccaactgctgaacaataacattcactacttgaaccaacggatggatttactgaaagtaattgatttgaaccatactctttatgtattatgatacttcttggagaatcttgagctctttcttctaatatagatacattaactacttcgttaaattcttgatttaattttttcgtatatggttttactatttcagtcaatgacattttttctcccacaaccatacctattgcatataaatttattcctagccaatacttaccattctctgcattttgtataacaaaacctttgttttcaagagtaaccaaagttctatgtacagtacttttatatactcccatagccttacttatttcagttattcccatttctctcttttcatgatataacagcaaaattatgtctagggctctatctaatgcatttattatttctcccatatacaaaaactcctcctgcaaatattaagtgctactcccacactctactaaatattatatattaaaattacaaaattatctatttatcttaattatattttataaaacaaaaatattatacttaatttgtaaaataaaaacaaaatactcactatgtccttattattcttacttttaatagaattattctgttatatttttatcctgactagataataatatatatatctattatacaatagatatatttttatacaagactaacaatgaggtgaaataatggataattttaaaaagatattgttaaatgaactacctaattttaaagaatattcttcaaaatttttaaatggagaaataaataaaatgcaatataagggattttctggtggatatggtgtttatgctcaaagagacaaaaaatcttttatgataagacttagagtatctgctggagttttatctcagtatcaacttaataaaatctatgaaatagctattaaacacaacttagataagatacacttaacaactagacaagctatacaattacacgatttatctataaattcaattgttgatatcatggaagaaggaataaaaaatgatatattcactagaggtggtggtggtaattatcctagaaatgtcggattatctccattatctggagttgaccctagtgaagtctttgatgttactccatatgcagttgctactgataaatattttatcaaaaatgctactacataccatttacctagaaaattaaaagtttcttattctaattgttacacagatactgctcattgtagtatacaagacttaggatttgttgctactttgaaaaatgatgaaccatatttcagagttttcttaggtggaggtctaggtaaacaacccaaagttgctttagaacttgatgaacttataaagccgaaagacgccttatattgtgttgaaggtatgattaaattctttatggattatggaaattatgaaaataaaaacagagctagggttagatatatggtcgaatcacttggtgaagaactattcttagaaaaatttaaagaatactataaattagaaaaagaaaatggtagtcttgaactcaatattgaagaaatagattactctaaacctggagttaaaatagatatacaagattctagactaatacctcaaaaacaggatggtttatacactgtatatatacatccagttggaggtattttgttaacaaaggatttaagtactttacttaaagaattagataatgttgaaaatcctatgattagactaggaatgacagagggattatatattttaaatttaaatggaaatgaagcaaaaagaatattagaaataagtaaaactattagttgtaattctcaattagaacaaagtatatcttgcataggtgttccaatttgtcaaatgggcatacaaaatagtcagaaaatgttacatgaaatcatagattattttagattacaaaataatgaagaaattttaaataaagcacctaagttatatatatcaggatgtttaaattcatgtggtgttcatcaagttggtagcataggtttatgtggtaaaaagaagaatgttgatggtatatctacagatgcatttgaattatttgttggaggcagttttgaaataggtaagactagattgggaaaatcacttggagattttaaagctagtgatattcctgaaatgctttataaaatatcggacgcatcatcaggcaatttttatgaatgggtaaattcaaatgataatattttaaacaaaataactgataagtataaaatataatttattatatttacttacaaaaagcatgggtgtctcaaaatgaactttttagtttatgagacactctttttctatgaaatcaaatatattttcatcatctcaacaatgaaaaataagactatctctattttgagacagccttatttcttataaatagtttaaattttatttataaacaattttagataaatcacaaatttctagcatagtatcatatacttgtttaagtaaagcaagtctattgttcttaatagcttcatcattatccataaccataactgtatcaaataaattatcaactactggtcttaaagatgcaaattcatctaaagcaataccatatttcttatcctttaataattcattaacttttacctttacttgtttaaattcattgtaaagtctaatttcagcatcttcttttaataaagattcatcaattttatcactttctgctttttgagctagagtagaaactctattaaatgcagtaagcatctccactaattcatctttttctagccaattattaagctctaaagctctcatatgcatatcagaaacatcatttatatcagaacttaaaacagcatcaacaacatcatatcttattcctaaatctttaaatagattttttactctctcattgaagaaattcattatttgctcaacaacttcttctttattaaaatctaattcagaataattatctaaagcatgttcaataagtacttttatatccacagcaacttttctgtccataagtatactaagtatacctaaagcttgtcttcttaaagcatatgggtcttgagaacctgttggttgtattcctatagcaaagaaacctgctattgaatccaacttatcagctattgataaggcaacccctgcattagtcttaggaagtatatctcctgcaaatcttggaagataatgttcaaaaatagcttcacttacaacatcattctctcctccaacttttgcgtattcttttcccataaaaccttgtaattcatcaaattctcctaccattccagtaactaaatctgccttagataatttagcagcccttatagtatctgccttttcatctactaaacctaaactatcaagtatatcagcacttaatttttcaagtcttaaagttttgtcgtaaatagttcctagttttacttggaatacaacagtttttaatttttctatgtagctttctaagtttctcttagtatcttctctatagaaaaataaagcatctgcaagtcttgcttctaaaactttttcatttccagctttaacattgtctattctgtaagaatcaccatttctaacagctataaagttaggtaacagttttccttctttaagtactggaaaatatctttgatgttgtttcataggagttataacaacttcttttggtagttttatataatccacatcaaattctccataaaaagcagttggatattcaactaaataagttacctcttcaagtaaatcttcatcaaattcaacttctccacctaaagaatttgctacttctatacattgttttcttatcatttcttttctcttgttttggtctaaaactatataatttttttctaatttttcaaaataatcttctatagaatcaacttctattgtactttcacctaaaaatctatgaccttttgttacattagaagatattattccttctaaatcaaactctaatactttatcatttaacaatgcaactatccatcttataggtcttgcaaatttaagattttttcctccccaacgcatagcttttgggaatactacagattttatagtctctggtaatatgtcttttagtacttctgaagtttcttttccatcttgctttatagtcgcaaatatatattcttcttttccaacttgtttaaaatatatgtcagattcgcttaatcctttgctttttataaatcctaatgctggttttgttaaattattttctgcatcaacagcaattttcttagcaggaccctttatttcctcttctaaatcactttgtctatcactcaatccttcgactactaaagtaagtcttcttggtgtcccatacgcatttattttatcaaaagctattctattttcatcaaataatttactaagattgttttttaattgttctagtgtactgcctacaaatcttgatggcatttcttcaacaccgatttcaaataaaagataatttttcattatttgtcaccgtcctttaaaagagggaatcccatttcttctctttgttttacaaaagtttctgcaacagtctttgccatatttctaactctacctataaatgaagctctttgactaactcctattgcacctcttgcgtccaatgtattaaatgcatgagagcattttaacacatagtcatatgaaggtattacaaggccattttccataagtcttaatgcttctttttcatatatatcaaacagattaaacaacatatctgcatcacataattcaaatgcgtacattgagttttcatactcagctttattaaatacttcaccataagttattttatcattccattttaaatcataaacactatcaacttcttgaatgtacatagctaatctttctaatccatatgtaatttctcctgtctcaagctcacattcaatattacctacttgttgaaaatacgtaaattgagttatttccataccatctagccaaacttcccatccaagtccccaagcaccaactgtagcagcttcccagttatcttcaacaaatcttatgtcatgctcacttgggtcaattccaatctcttttaaactttccaaatataattcttgtatattatctggagaaggttttagtataacttggaattgatgatgttgatatagtctgtttgggttttcaccatatcttccatctgctggtcttcttgaaggctctacatagcatacttgccaaggctcaggtcctaatgatcttaaaaaagtattaggattcatagttcctgcacctttttcaatatcataaggttgcatcatgatacaaccttgctttgaccagtatttttgcaacgccagtatcatctcttgaaaattcataaaaatccctcctataacaataaagcctctcgtctacacgaaaggctattttaatagttcttctacaacttttagaatatcaaattctataaaatttgtcaatgttagtgataattcttataattatcttctcttcattttttaaaagtcactttatatctatttattttcgtcttcgtcttctttattcttttcagattcttctttcataaggtcagcagttacatctttgtcatcttcttttttgtcaactactacatccttcacatcttttgctgcattagttatcatattcttcaaaacgtgaagtttttcttcattcaattcacctaaatctacaatttctccatcttcttcattttgaacttttatacgatatttacttataacagcagctgataatccaactaaagtagctaatggtacaaaagctaatccaacaactccaactgttaaaggaatgttcatcatagtttttccatctttttcaactattattctcactacactactttttctaagaagctcttttaattgaaactttatattttctccatctttgccaaatacttcttccatagtttctttagcagattttgctttacaattacaagtattttttttattttctaaatatattactgcctcaattacatctccattgcacattactaatgcttcttttgcttctgcataagttgctcctggaactctttcaaagactgaatcaaccatttcaatagttatattactactcatcattatccactcccttattattttttacactttgcaatacgtgtaatgatttaaaattaatattatcaacataaactttcaaatacttgtctagaatattctcaagttcatgtgttatatattttgatactttagctttactacatgttaaaatatcatttcttaatacatattccataagacttatagttgttaagtctaattttatattattatcaaaaagtttactacacttactacatagtataccaccttcgtagatattaaacacagaattttgtaaaattttacattcacaattaatgcatttatttactataggtttaaatcctatatagtctaaaaattttaactcgaatgctgctgttataaacctattgtctgtattatcctgtgtatacaaatacagagtctgcgcaagtaatataaatagcctattattagtctgattttcaagtatagaattttcaactaattttgtaatatatgtagcataagaaaatgcctctatatcataggatatattataaaaactttttattatttcactttgagtaaccttgtacatattaccttgtttttttaaggtaaaattgctataagaaaataattgtgatgatgaaagcaaagagctcttattttttttagctccttttgctattgcagatacttttccaagctttcttgtaaatagtgtaagtattatgtcactttccttataccttatagctttaagtactatcccctgggtgttcaggattatcatcgtcttcttttttctcccttacttcttcaatttcttcatgtatgtttttgcaatcacagaaatataaatatgcatctatactacctgtttttttaaaaacttcccaactgatattgttcatttttaaaaaacccccttcttacatttatacttatatttttagtaagaagaggataaatcatacataaagttattaaacaatttttgacaataatgccgttgttattataaagtaaactgctataccagttatatcaagagctgtagatataattggtgatgaaactgtagatgggtctgcatccattttttttaataaaacaggcataaacgcacctattgttgcacctaaaaccatatttataaataatgatattgaaacaattaatacaatgtctaactttctcataacaaagtaaattacaatacctgttattatactacacaaaagacctgtaataatacctacaataccttctctaaccacattgctaaaatttaaatccttattagataatgttattactgtaacagatgatgattgagttccaatatttccacccataccaattactacaggtataaaaaatactaatggagcatatacaggattcattatatagtctaagttagaaagtattaacgaagccaacaaccctccaaccaaggtaataattaaccaaggtaatcgtcctctaagtgctgatattatttgctctctcaatgtagggttttctttttcagcaacttctctttcatgttctgaacttcctgcaaatttatacatatcttcagttgcttcttcttccattacatcaattatatcatctactgttattattccttttaatttttcttgtctgtctactactggaattgctattaaattgtatttagatactaatcttactgcttcttctctatcttcatctacataaacagagattatattttcactcatcaaatcttctactatatttgcgtctctagctattattaattctcttaatgacaatactccaactagtttttcttcatcatcaaccacatatatataataaatagtttcagcttcttcagcttcttctctcatatggtctatagcctcaagagctgtcatatctttatttatagaaatatatccagtggtcattgttccaccagcagaatcttcatcatagaatagtaactcttttacataatcggcattctcttgattcaaaagatttattatgtgttctctttcttcttcttcaagttcactcaacttgtctgccatatctccaagagacataagttcaagtatatttttcgagtgttctacatccagtttagataaaatactaataaaaaactctacactaccttcttctaatatagaagatgccatatctaaaggaagtacttcaaataattgaattttcatgtcttcctctaaattttccattatatcgaatatatcaattatatgatattcctctattaattctcttaactccaatactttattattatcaattaatgattttacttcatataataaatcttgggaagcatccagtttcctatccatataacccacctttatttatcattatatccaaaattatttatataattttgtaaatttctccaattttctttgactttaacccataattgaagatttatttgtgaacctaaaagcaattctatatcttgtcttgctgacttacctattccttttagtttcctaccattttttcctattattattcccttatgtgaatctctttcacagtatattacagcagatacatctactatttccttatcatttctcgctttcattttttcaatttcaacagctacaccatgaggtatttcatcattaagatagtgaagaactttttctcttataagttctgctattaatactctttctggctggtctgtaatcatataatctggaaaatactttggcccttcttctaaataattttgtataacttttattaaggtatccgtattctttccttttaatgctgatattggtactatttctttaaaaataccttctctatcatacattttgattatatcaaatagctcatctttttggtctagttggtctattttgtttacaactaaaattattggtgtcttaacacttcttaaatcctctattatctttctatctccaggacctatttttttagaatcatcaactacaaataatattaaatctacatttttaaaagcttctgttgctgcctttaccataaattcacctaatttattttttggtttgtgaataccgggtgtatctaagaatactatctgcatttcttcatctgtatatactgcttgtattgtatttcttgtagtttgaggcttatcactcattatagctattttttctccaactacattattcattaaagtagattttcctacatttggtctacccactatactgacaaaacctgatttgaacattaactgtctcctaactttttatcttcttgttttaattacttaaatttatttatacttttaaatttattttaaatcatttccagagaaatagtttggcaacaaatcctttatactatgctcaaacacctctcctttagtatatcccgttattatttttatatcagaaccaaactctataattacctgcctgcatattccacatggatatgtttgctcattattttctgagttatcacttgctatagctattttatagatatccttatcaccctctgatattgctttaaaaatagctgttctttctgcacaatttgttccacctaatgatgcacattctatattacatccagtataaactttaccactcttagttaaaagagctgcacctactctaaaacctgagtaaggagcataagaatgttgtctggcatcttctgccaaccttaacaattctatgttatccacaacaactcctcctgtatacaataattaaaagttatttttatttaatactctacattatatcataaaaatttaattagcacagatttgttttattttaaatattttatgtacatttattttaattatagaacattccaagctgaaatactaatatagctatcaacacacctaataaagctccagcaatagtctcccaaaaggtatgtatttttccttcaattctactttgggcaactaatacagccattatatatgcaagagtagaggcaacaactctttcagtcataagtgtaattgcagttgctatagcaaatgctaaggcagcatgaccacttggcattcctccttttagaggagtacctgtagaagtcaatgcttttacaactacaacagctataagaaccaataatatacatatcaaggttatatgtaattctgattctcttattttataaattaatattccagatatatctgtcaatttatcataaaacaaaatatatccaactactactgaatttagtgctgccactagaacgcctccagctgcaacatcttttgctatcttagcaagaacatgatattcatcagttactaaatcaacagctttttctatagctgtattaaacatttcggcaactacaactaagcatatggacataagtaacattatcatttctaattttgaaaagttaaaaaacaaacttattataagaacagcaactgaacctaaataatgtattttcatatttctttcaaatttaaatgtatacaatatcccttctatagctgcattaaatgctttaattataccttgacgagttttttctggtttcataaaaactactcccttgttatgtttaacttatttaatatgtgttcttctttttctctcatttcttttgtattttcatctgtatcgtggtcataacctaaaagatgaaacatactatgacatattaaaaaacatacttctctttcaaaactatggttatactctatactctgttctaaggctctttcaagagatactactatgtcacctagggattcttcttctaactcaacatcctcaaaatcatcacttaaaagaggaaatgataaaacatcagtcactctatcaactcctctatattctctatttaattcatgaatctctttattatctacaaaagaaagactcacttcataattatcatcatatccttcataatctaaacattctatgattatatcctttatcttttcaattaactcctcacttacttctaatttatcttgtctatcatctagtatcaaatccattcactacacctactttttattcattaataatgctatatatctatattactacacttttactttcttttgaaagtcttttcctgcattttcacttttttacgttcttcttttttaaattcttctcttttgtcgtgcttctcataagctcttattattctctgtaccaactcatgtcttacaacatctctatctgttagcattatagacccaatacctggaacacctttaaggatctctgtagcttgtattagaccactcttcttattttgtggtaaatctgtttgagttacatctcctgtaactacagctttagagccaaatccaagtctagttaaaaacattttcatttgttcagaagtagtattttgagcttcatccaatattataaatgaattatcaagtgttctacctctcataaatgcaagtggtgcaacctcaatagtacctctttctaaatacttattaaatttatcagcacccaacatttcaaataaggcatcatatagtggtcttaaatatgggtcaactttgtcctttaaatctcctggtaaaaaacctagactctctcctgcttccacagctggtcttgtaagtataattctactaacttcatctcttttaaaagcttttactgccatagcaaccgcaagataagtctttcctgttccagcaggtccaacaccaaaagttatatcattattttctataagttttatatattctttttgacctaaagttttaggttgaacagcttttcccctttgagttatgacgattgtcccctcaagttcttttattttttgttcacttccttcaagcaaaagagataatgaataagaaatactctgcttatctaaatgcttaccatttgatacagtttggtgtaattcattcataagttttaatgcagaatctacatttttttcttctccaattaaaattatattgccttctctaagtattacatctatatttaaagtcttctctattaattttacattttcatcaaagttgccaaataactctctttcaaagttaccatctgctattgtaaatttcttttgtattatcaattgaattagtcctcctaagattttaagtttaattttattagttgttattgctattattattttgactattattactattttgattactattattttcatcagaattgttttggtctttattatccttattatcctcatcaaactcatttcttatatcatttaatggtcttttttctggattggaaggaacttcctcttcaccttcatctggtttactttcttcctttataaacctttctgcttctgacttactaagaggataaattttagcaatattttcactagtttgaactgttattaaatattctaacatatttttattaaccttaaagttatgttttacatctattattctagccgaagctgggattatgtattctaactcttttaaagctttttcagataattctttttttaactcttctttattcctttttacttcaaccttttttgtttcataaaaagtactcgtttttatctttattggaaaagtatagtttcctattgatagttttttttctttattttcaacaacataatctttatattttatattttttctcattgtaaactctttatcataaaaacttagtgtatatatatttttcttttctccagtttttttatttacagtatctacataacttgccttttttgtggactcataaaaagtacttgcccatacttctggtattgacttggtattagctccatttaataagacatctcccttttggactatgtctccagatttaataactgatttaccacttctagggattaccttttctattataccattttttaaagcaattacattacaataatttgattggtctgtagattttagggattctgccttttttgtaacagtaacaaatatatttgttccttttacattgatagataaatatgccacatcattaaattttgacatcatatggtctctaacttcttttctatcaatactcttcttatagactcctggtcttactccaaccttataaagctcatttctaagagcttctttttttataccttcaggagattgtatatatacatctgtcacaaactgcgatgtagacatcaataaaaataaagaaacaagagcacaaatccacatacctttgtgcttataaactcttttgataataaaagggaccccagttttttgctttacctttatatcaaacttacttcctctataaacattcttaaattcttttatatcttgtctatctatatgaaactccattttagtattttttattctagttacattgtaaacacttatcccatttcttataagatgatttaaaaattgttcgagtcctactccttccacaactataacatagtatccccttataaaacttatcaagtgtatctcctcctaatcaacatactcaacattgtagataatcccttttatacctatctcactatcagtaatatacttaagtgaaagtttatccccagatattttaattgttttaactttagtctttattcttattaaatcaacttcatattctaatattgatagataattttctatactaataaacgtattacttgtaacagtaataactggttgatttacttgtaaatcagtggatatttctaacataagcattacccccttaattaattttatgcttgaaataggtatttatgcactttattgatgttgtaacagattagttttaaaatttttatataataaatacctaatatctaatatattatttaaacaataaaaaggtaatcatattgataaaaaatcaacatgattacctttttattttttcttatataaaatctaaacgtatacaatttttattaatcttgttctattaaaccatatccaccagctttacgcttatacactatgtttatttcaaaattatcttggtttctaaacatatagaaattgtgtcctactagttccatttgaagtatcgcctcctcagaactcataggttttacattaaatttctttcttctttctattactatattttcatcttcttcatcatcataatcataatcatcaaattcactgctattatctataaagtcaagattttcaaatcttatgctcttattattttgaactttgtctttaactttagttttatatttgacaacttgtctacttaatttgtcacaaacaatatcaattgctgcatataagtcatcttctacatcttctgctcttattatttgaccgttaataggaattattgtaacctccactttttgtctatcctttttcgcacttactgttactttcacttctgattcaggatcaaggtatttttctaacctacttaattttccatctacgtatccttttattccgtcagttaatttcatttgtctcccagatactattatttgcataaaaacctctcccttcaagcctttccaattctaatactttaatatgttaatctttaaatacaatttttataaatttattgtatttaaattaatattattgtatatgaaaatgattatttttaatagtctatttatttttcgtttgttatgatattattaaaagtacagggtaatttacaaaatctttacattctatttattaataaaccatataaaatagttcaaaaatcctgcataaacaagccacattaaataaatcaaatttatgtatccagatctcttatctattttagaaaacttcgaaatcattattatagaaaccaaaatcattattattatatctatcaaagctgtaaatctaagtccaaatccaaaaaatagtatactccaaataaagtttaatacaagttgtaatccataataaaaaattgcatctcttaccttaggtaagttgtaaccctttcttaatattaggtatgaagatatacccatcaatatgtacaatatagtccaaactataggaaagataaaagctggtggtgcaaagcttggctttgtgagttgtaaataataggttgaaatatctgttccactgataatcattgttaagatgctacttaagtaacctattattagtggtataaatatgtttatcaaaaaattcctaatctcttttactgatataatcaaatttttccccttctttcaaaattttctttgattatagatatgctcaaatatgactcgttattcccaaaaactataaaaagcctagagatttctctctaggctatatcaatctattgtaagttttgttttaccaacttatttataagttttccgtcagctcttcctttaacttttggttggataactgacattatttttcccatatccttcatagaagttgcccctacttcggatatagtagattttacaatttcttctaactcttcttcgcttaattgttgaggtaggtactcttttaaaacttcaatttcaccttctgtttcttttattaagtcttctcttccagctttttcaaattcaactaatgcatctctacgttgcttcaattgttttgctattacatcgataattccatcttcatcaagctcgaccctattatcaacctcatactgctttatagaagctcttattaaagttactacagattttctcactgtatctttgtttttcatcgaagatttcaaatcctcttgtaacttttgcttaagggacatccccttcacctctttattcttatttactactatttcttagcgttttttcttcttgctgcttcagcttttttcttacgcttaacgcttggcttatcatagtgctctctttttctcacttctgacatgatgccagacattgcacattgacgcttgaatcttcttaaagcgctgtctaatgtttcattctctctaactcttacttctgacatttctttttccctccctccaatagcgcaattatgctgggactgtaactatgttctttttgcataatatgcattacaacctaacactttgtttattataaactaaatttttacttttatcaagtatttttatcaagaaggaactcaatttttcaataatttagtttagttttgtcccgcttcgtaattaggaagctttttaccagctaaaatatgatagtgcaaatgtttaacttcttgccctccatcacttccacaattatttatgactctgaatccagtttggtcaaaacctttctctttagctattttattaataacaacatgaatatgtgacacaatgtccatctctttatcaggaatatcaattaaactatcataatgttttttaggtacaactaatatatgatatggagcaactgggttcaagtcattaaaagctaagactctatcatcttcataaactttagttgaaggtatttctccgttcgctattttacaaaaaatacaatccattctttccacctcctatcttataaatattataatttctacatgttatagcaaaattccttctacatattcatcttttacatcatttattttcacttttaatatctgaccttgtatatttttgtcactttcaacaacaactcttatataatttgaagttaatccctcatatttattgccttctatattttgttcaaacaaaacatccagctcacggccgataaatttagttgcaaatttattaaaatttactttacttaaatttaaaagttgttcacttctaaagtgtttcatttgagggtcaacttgattttccatagttgcagctggagttccttttcttggtgaatatttaaaaatatgcatttgtgaaagctctatttcttttaaaaactcgtacgtttttttaaactcttcatttgtctctccaggaaaacctactattacatctgtagttattgccacatctggcattttacttctcaatctatctacaatagttttgtactctaaagttgtgtatcgtctattcattctttttagagtttcatcacatccactttgaagtgataaatggtaatgaggacaaactttatccatctttaaaacttcatttacaaattcatctgtaaataaaattggttcaacagaactaagcctaattctttctattttttctatctggtttatttgttttattacatcaagaagtttaatatccctatcctttaaatcttttccataagaggcaacatgtattcctgttaatacaacctctttatagccattattagccaattttttcacttcatcgactatactatcaatatctctacttctaacgcgtcctcgggcataaggaatgatacaataagtacaaaatctgtcacatccatcttgtattttcataaatgctctagtctttccattagtttggctgatttctatttcttcaaaagctttaactttcattatgtcatcaactgtactaactttcttacttgaatttatctttttaatttcttcaacaatctttcttctatcatttgtacccatgactaaatttacttcttctatatccaaaatttcttctggagatacctgagaataacatcctacaacggctattattgcatctggattcttctttttaactcgtcttatatattgacgagattttctatcactcatatgagtaactgtacatgtatttataacataaacatcagcatactcttcactattgacttgttcataaccatctttctcaaatagttctagcatagcttctgtttcatattgattaactttacacccaagtgtataaaaagctacttttttcaatttatttttctcctcctaaatcacttagttcatacaaagctattgttgatgctacaacagaagctgtctcagttcttaatattctaggccccaatgatacaacattacaattatttttttgtatttgctctatttcttcttcagaaaatccaccttctggacctataaaaattccaacactatctatattagaatcacatttttttagtgcatgttttattgaaactgttctttcattttcataagggcaaatatttacattattttttttcatatcttctaaagcttctttaaaacttaaaacacctcttaattttggtatcttacctcttttgctttgctttgctgcttcataaattattctttcccaacgttcaaattttttatcttcttttttgtcatcaactttaacaacacttctcttagtttgaactaatattatttcttctacacccacttcagttaatttttgaagtatcatttccatttttggagcttttggaagtccctggtataaccttactttaagttctgattctctatttatatcaactttttctaaaatctctaaattaactatactcttatctatattcattatctcacaaatatactcattattattcttgtcacatatttcaagtttctcacctagtttgcatcttaaaacttttgaaatatgttttacatcttcaccttctatagtgcaagttttatcttgtagatttatattatttttttcaacaaaaaatctatccattatacgtcaccatatcccttattttttaagcttagaaactattgctgaccattcacctaatttttgaacttcaactatttcaaatccattttcaattaagctttctttaacttcttctactttatccaaaattatacctgaagatataaatatagcatcttctttcataaagttttgaacatcttttgcaagtatctttattatatcagctattatatttgcaactattacatccgctttatcttttattacatcagttaaattaccatgcattacagatacacttttttcaactttattttcaagaacattttcttttgcaacttttacagccacttcatctaaatctacagctacaacttcttttgctcctaatttagctgctgctattgcaaggattccactaccacatccaatatcaaatactttagaatctttattcacatacttttctaattctctaatgcacatactagtagtttcatgtgtccctgtaccaaatgccattccagggtcaagctctatgattaaatccccatcttgcatagcataatcttcccatgtaggctttactactaccctttgtcctacttttgttggtttgtagtatgctttccatgcatttgcccaatcagcttcatttacttggtccaatgatacacttccttcacctatatctataccaaaatcttttaatcctaaaactttttgctttattatttcgacaaattccatcacatttttttcttcagaaacataagtttttataagaacatcatcttcttcattctttttaaatacttcttcttcaacataatcccagtctagttcatttttcttttggaataaaaagtcttttgggtcttctattacagctcctccagctccttgttcatatagtatattcgttataggttcaactgcttctgttgttgtttttatagttacttctatccaattattcataagtttacctctcttctctatagtaatattcctgtttttccataacttttattatatcataaatataatattttgttgttttatattattggttttaaattcaagctaataatatccttatataatagtcagaatatttaaaaatccgattagttaattttaaacctaataataaaacttctattatatctactatatcaatatttgaaatccacttagttaatcttaaacatacaaaatctccaacttataattattttcgcgatgtacctgaaacccacttagttaatcttaaacctcaaatttattatctatatacacttgtagacactctatctcacaacttatttttccttttaaaaaatagtttttacagtgggcttacagtagtactttttgtattttcaatgtctaaaggtatattatatttaaacatatgctcacttcaaaattaagcctacagtactattatactcaaacttactactagattttagtaccatgtatccttctactttgcttattaatccataataatataatctattaaatataaaccctgatacttgaatcgaatcttgttgtaactccctatcttccttataaaaatcttcttccagaataattttgtaactaacatcaacatctctaaaaattttagctgcttccttcttactatcaacaatatttttgtaaggttcaaaattaaaaattaaatccaatccatcaaaaatttctttatttataccataaatattcttaatttctttatcacaacttataaaattctcttcaaaatagtttttaactacactattatcatagtaatcatccaaaatagtttttctaatccccattgtaaaaatagagttagtttttaatatgtcctttaagatgtttttagttgtgttcttaagtttgttatcataaattttatcttcactaggtagaatataaaagtttccatattcatatttattatttctattgcatctacccattctttgtattaagctatccatagttgctaaatcacttattattatattgaaatccaaatccaaggatatttctactgattgagttgatatccaaatatcaccctctccatttaatattttactatatttctcttttttatctttgaacttaaatctactatgtaaaacatctatatctacaccaccatacttatcagataaattttcttttaaaaactcatatgttctattgactgaatcaatagtattctttattataagaattttttgtttattttctaaagcaccttcaactattgacttgatttctttttcctttataaaagaaacctttacatctttaccttcacaaatttcttcttccttgttgctctcaataaaaactatttctcctttatcagtaacattttcattactttcttcttgaaaaataattcccttgtttatcatttgctctttatatgattttggaagtgtagctgtcattaagtgaaaatcaacatctaagtacttgcatgcaaactgcataaaatatatcaaaatcaaaaacatctttggttccaataaatgtacttcatcaacagttatagatgcattttttacggctgcgaatattttttcatatcccggaaatttaaacatactaagtaataactggtcaactgttgcaattacacaaggtttacaaaaatttatactcaaatctatatcccttaatgtcaatacaaaatcatgttctccattatcttcattctctgaatataagtttatatctccatgaagtaatccaatgtaatcattactacttcttgtatctaaatcatttttattttgaaaaatattttttctataaaaactttctgctgatattttatttggcactaaaaagaattttcttttaaaagtctttctataatctgcagctgtttttcctgaacctgtaaatgcaacagtcagaacatttcttccagaaagttctctcaaccttttttgtatagtattgaactctatattatttttttctaaattaccctgactcttatatatctcatttaaaatcatatcatcaatttcttcatcagtaaaatcgttataaaattttatacctttctgtctacttgatgcactatggtctattaagttcagcatccctttatataaaatatacttaaactttctataatttaaaactgaatcatctatttgaccattgttataatcactgtctataaacatactttcacttaatttatctatgtaatcataatccaatacatcttcaccaaatttaaaatctacatttaaaatgtcatttatataactttctatatctttcagattaaactcttctttttctaaaatgcctttttcaatataatcataaatttcttcttgaactttactagtacttaacctcatataatcttcatagtttccatgatgtaacattatacttttatatatatataacttatcttcttctaacaagttcattttttctaatatatcttttaaaaatgctccagaaaatatattgtgtcttgctatcttttttaaagattttttgtcagactctaactttttcctctcttcttctgagcaactatacgatattttattattaatctccattttttgttgcataattgaattaatttttcctaaatcgtgcaaagcacaacatatttttagtatctctacatctttatctgaatatagatttagttctaatatagattctaatacttcaaataaatccttaatatgttcaactaatgtttgttcttgttgattagttcttaaattatatgacttagctaatatttctttttgcatgatatttttcatgataaacacctatctttcaaaataatttaaagccatgtaaaaacttcttttgtatcaatacatacattacatacatttaccttaatatttttaggatatataccatcattatcaacatatatataatggcaaaactcataaactctatcatctctatttgcttctaaatctttatatttataaggtaatgcaatcaatacaccttgatttattatagtctcgacattctctttatctcttaagtcaactcttacatatgtattctttaattttatattttcttttatagcatcacgagtattcataggcataacctcttttaactcaacttctttcacaaaacaccctttttcacttggtattacaaaatcttcttttcttcctaaatttgcatatttacatggactttcaagcttttttttaataaattcaagttcttcatcatccttgcaagaaataaatatagtcagttctacttctttaagaacttcatagtttaatatgctattttgagctttatgttctttatagtaatcatagtagtttccttgaagcaaaaacttttctttatctttgccttttctcatatttgtatattcattccaaaaatcaatgttctctcctcttgaaaattctagttctctatgatgatgtgttccaattattcctatatctatatcagagtttaatcttctatcacataaatacgttatcattcccattattgtggtcttagatggtaaatttaaagtacttatatattcattttgaaatacttttgggtctctatagtgagcagttggttgcttaagtttacattgtaatactttcataattcaaaaaacctcctactcttttaaataccacatattatcttctccaatttccaatctatctgctagatttttaatctcttttacagggtatttacttaaattaaacttatttaattcctttttattagaaatttttaatttgtcattgatagcaagtattgtgttactttctttaaggctataactttctatagtttctatgactccctctaaatttatctcaccactatcagcattataatctacatcatcccaaaaaaacggtacaactttatcaaaagctccacccattactgcaagtggttttaacagtactgatgaatgttttatgtttcttgtaaacacagtaattgcatctaatatatcttttactgctttttctcttaactccttactcataaattttctttcttctggtaaaagcaactttccatcttctacttctactactcctattctatcaagctccaatgttattgtataaacgtagtaatctgataaagtctcttctattgctaatgcttgtgatgttggaaagttttcatctctaagtacttcattttcttccttctcatcataatattttctaccaaattcgctacttaaaaaacctctatttgttatcaactgtgttgaacctctatatgaatttaatgacctaaaaggtattattctaagcggagaagccttacttatagaacctttatctttaagtggtatcaaataaccaaatacatcagtctctaatccattttcatctacacatcctacattttgcttaatagatggatatatatttccttttttcccaaaaataatattacttaaattccaaccatattcttggtggagcattcttcttaaatcatatgttattgtggctatactagtttttgcatgtattttttctctatattgttctttttttattggtgtataatttccatacccttggtcatatgaaagtggaactgggctttctgtcagtatagttaatgttactccttttactcttttttcattcattttaaattttcccccttttttatttcatgatttcttgaataaatagacctacattcgtatttaattctaattcagaactctgcattagaccttctacaaacccttctcctattaagattccattagaaactaacacatgcattatagtttgaaatagctgagttctatcattagacttaagtagttgaatcactttcatagaaaaattttttcttctggattcatctgtcattttattaaataagtctttacctactcttgaatatattaaattactttccatatagtttttcattttatactcctcccctccatctacaatccaacacaattttatatataaaccgatattatatgagctagatacaaaatccatttctcgagaagttccagttagttgccttaaaacacttatattatcaagtaataattcttttaaatttgataaattcccattatcaatcatttttttacccaaatttctagtattccctggctctcttgaaaaattataattatctataatatctataagttcaattttttttaataattctttatactctataatagagtcaaactttagaattatacctttattcgtatcaatatcaaacctatatagtctaatcgaacttattttttcatgcaaaagttttttataaaatgatttatctgaatacatctttcttttaagcattatcttatgatttaaaaatgctaattcccttaaatcattcgtatatgcaaaaaccattggtctttttaaatttatatataaaagacacattaagttgaaaaattcacactcaaaacaaatattactttcaacttgtccacttcttttaaagcctgatttttctgcacctctaaataaaaagttatacttagagtcctttcgctctcttaaatcaatatctagttttgttgttttatttatattacaaacattacatacactatctttttcttcatattgtgtcaaatcaagtttatctatttcatctatctctatatttgatttaattacagtatctactattctttttacatttgtttccatattttctaaactcgtgtttaatccatacttaccactatttctaacatatggaaatcttctgtttttaaaatcttttttaatcccttccttttgtttctcagttgcagaagatttatctaattcttcaataaaatttacatacgttaaattatctatattactaaatattttttctaaggtttcctttttcccatttttaaataccttaaaaagttgattttctaatatataatcagatatatacttagggtctatatattctgcagattctaaagataaataatttctatttaactcacaagtaaattttagcttataatcatttttttctagttcgttttttaaatccattagtaattcataaaagtaaacaatgccaatatctcttacaatatcacctgatctataaaatttagcttttatttctctcacctcgctactttaatatatcaaccattcctgcattttccgtccttctatatccaattcccattttatacagtgcatttaaatcttccatatttccttttaaaaaaaatgttcctgcataagcatttatatagtaatattctctcactttaaatccacgaatcttttcttttaacactctttttttgaagttaagaggtataaattccaatggctttctaagcccactacctcttatactctccagagttagattagctatatagtttaaacattctatataatttgaatcttctacatctaaatatttaccttctttattctttactattataggagacatagttttaaatataacaccattttcttttatctcgtgttctttatgtatttttatattttttattttaaatctataacctttatattctagctcctttacttttaaaattccattgtataatttactgaacatagaataattataaaaacttatattgaatattatatctccatcaacaagcaactcatttttgcttcttataagatttggtatgtagatggctgtatttatatcctttatttgcttattgttttttctttcttccccatagttaaatatatttttagcaaaatctttgttttctgcatttaaaatattttttataaaggaaactgacaacattgaattttcatttggaaatttgccattacatgactccataaaaattgaaattctgctcatattttcacctcctactttctagtataattcattattctctatttgtaatataaaaaataaaacatatcataaaatgattttttgataataaatttaattttgttttttaattttttaaatatattttactgttagttttattctttgctaaaaattaaatatacatattaaacaaatacatttagtcattttacacatttaatataataaaaaaatttgatactatatcattaaaatttaaatatcaaggagaatattatgtcagaagtaattttaaaaaatatatcaaaactttactcaaatggatttaacgcagtaaaaaatataaatatagacattaaagataaagaatttatcgttttagtaggaccatctggttgtggtaaatcgactacacttagaatgattgctggtcttgaagaaatctctgaaggagaactatacattggagataaacttgtcaatgatatagaaccaaaagatagagatatagctatggtttttcaaaactatgctttatatccccacttatctgtttacgaaaacatggcatttgcacttaaacttagaaaattgcctaaagatgaaatagacaaaaaagttaaagaagctgctaaaatattagacttactacctcttttaaataaaaaacctaaaacattatctggaggacaaagacaaagggttgccttaggacgtgcaatagttagaaatcctaaggtattcttaatggatgaacctctatccaacttagatgcaaaacttagaactgctatgagaacagagataactaagctacaccaacagcttggaactacatttatctatgtaacacacgaccaagttgaagctatgactatggctgatagaatcgtagtaatgaaggatggagtagttcagcagattgcaactccacaagatgtatacgattatccagctaatatatttgttgcaggatttattggagcaccacagatgaattttattgatgtaatattaatagaagaaaatgataaaatttatgcacaaaatgaacatattaagcttaaattgaataaagaaaaacactatgatttaataaaagacaattatattaataatgaagttgttataggtatcagaccagaagatattcatgtagaagatacttttattaaatctaatccagatacttgttttaaatcaagaattgaaataaaagaacttatgggagcagaaacttatgctcacttaaaactaggcgaaaatacgataacaattagatttgacagtaaaaacagaattaatgttggtgatgacttaacactttcagttgacaatagtagagtacacatatttgacaaagaaactactttagctataagataagaatataatcttatttttaaggagactttatggaagagttaaaagattttttagaaagacagcttaataaaaaaataaatatctatccctatgaaaaccaaaagttagatgctagtagccatttagttactttcaataatgctatttatgttattgattttctagataaaaataatcttgataatttaaaaggcaacttttatttaatttaccaatctcatatagactttgaatacctaaaaaatattttttataatttatttgaagatataaatataatacaacacaatggtttttttatagtaaattctaaatataatttagatattaatgtaactacacaaaatataattgaaactgaaacttatcaaagtacttatattttttatcttggtgaattagatagtaaagctgatttttattttagattacagttatgttctgatttactacctcatattataaaagacaatgctgaaaataagtttttaaatttgtttgaccttattagatataaaactttagatttaattaatgaggataatatactcaataaattaatagattttaataagattaaatctattgacgaagaacttctatatacaggaataaaatttataaataatgatttaaatatttctaagacatctactagtatgtttttacatagaaacacgctagtatatagattggaaaagattaatgagatacttgggtttgatttaaagaattttgaaaatgcaatgattttttatctaagtgtcaaatcttattttctctataaaaaaatttaactactaaattaagcagagatttgaaagactagttcaaatttctgcttaattttaattcaaaatattgtatacttatcgagtactctatgcttcaaaacttagaattaataaatatcaaaccagttatgttttacaaacaatatttttaaacttatcagttattagacttattaaatccataaatccactattctacttttcttaattctttctttaatataaaatttaataaaaaacttattgtacctaagaccaccataacataacctaatatctgaaattgttctgatgttatatttccttcaaataccattccaagtaaaacagttgctaaaatagaacctaaataacgactagtttgaaacagaccagaagctgtccctatactgtcacgaggactttcttcaaacatagaggattgcagggctacattaccaactccataactaatacctgctaatgataatataataccctttcctattacaggtatatggataaaaactactgaaagaagtactgcactaataaacataaagattgatgatgtaacaagaggaaatctagttccagatttatctatccattttccagttaatggagatataaatatacctataccagacataaatagcataaataatccagtcgactttgcactataatgtaaggcatcttgaaaataactaggaagaccaaaaaacaaaatataattaaagaaatttaatataataaattgcaagtaaacttttgacaatttaggattacttacaaaaagcttaatatctataaatggcaattttgttctcaattcatgccaaataaaaagacacatcagtattataccaaatacaagttgttctaagttaaaagattccttcatagatagcaaaaatagtaatataaaaatcattgcaattgaaaatagaagtatgccaataatatctaatcttgacaaaacattttttaaagtttcttttatagatttcttttcttttacttcttttgggaataaaaaataccctaagcatatagaaaccaaaacaacaggtatatttacaagaaatatagcatgccatcctcctaagtccaacaataatcctccaagtgtcggacctaatcctgctgtagttgaagcaaaaatggttagaactgctaatgcagaagattgtctttcttttatattattttgtataagagcaactccagatggatatagggtacttgttccaattgcttgaattactcttataaaaatcaatataaagaatgattgaacaagtggtactatggatgctgataaaattacaagcatcaaaccactcaaaaataagacctttctacctattaaatctcctatcttacctgaaactggttgtgcaatagcactagctaggtaaaatgctgaaacaatccaagatacagttgtaaaactaatatgaaaatcattttgtatactatgtaaagcaagtgaaatcatagaagaattaagaggattcagcatagttcctgaacctattgctatcaaaaaaagcgttcttctagcatttgttttacccatatatcatcacgcctccaataagcagttcatttacattataaaaaagctgctcctataattcctgcgtctgaacctaaagttgcacatgtaattgtagctatatcttctgttttgtataatacaaattttcttaccaaatcttctattccatcaagtattatatcgctagatttagaaatgcctcctcctatagatataatttctgggtctaaagaatttattgtgtttgcaaaagtttttgctaaataatctttaaatctatttattactttaattgccactaaatcattttctctatatgcatcaaacaccatctttgcatttacattttctaaatttccctctgccaaatctaaaatcctactcttttctccttcttctatcagtttttgagaatactttataattgcagttgctgaacaaaaagtttctacacaaccattatttccacaattacaattaaaatagttttctcctataatttgatgacctatttctgaacccaatccatgtgctccagaaaagactttttgattaattactattcctccacctacaccagttcctaaagtatataatactccaacattagcacctttcatacttccaaactttgcttctccaagtgctgctactgttgcatcattttctccatgaatttcagcatctggaaatcttctttttaactctttattaaaagcttttttattccattttaaatttacacaagttactaatccttctttatttataaaacctggaacaccaaatccaatagattttatgtcactcatagtaagtttattatcttccaacaacttataaatcattatttttatgtcattaagtattccttcaaagcctttttcaattactgttttacactctgacctaaaaattatcttcccatagttatcaactactcctgcttgtatacctgttcctcctatgtctacacctatataatacatctcttttcacctttctcttttgaatcatttaattttatctatattttattatatatatagtatattaaaatgtgacactatgcaaatttttcataaaagtttatgaacaaagcaaaaacatcctctcacagtatattttactatgagaagatgtctattttattaattattttaatttggcaagtgttcaaaacaaactatatttaaagcaagtattttaaacctttgtctttacttatttttttatctacaaccttatttataattaaacatcaaacaaatcttaagcacatttttagttggtataaactaactttctataaaaaacaatctcaatgttttagcaatttatactaaaaatttttcatagattataagtatatttctttacatatacccaactagacacatattcctttacatacacatctagcacaataaccaataccatatacatatttctttacacatgtatatactaaaagtaattcacaactaggtttccctaattacattctaatcagatataccctttataaaaattttaactcatacaaaagatttaaaaattagataccttgtctatataatattactattttactactaaaagtttgagtctaggtaattacaataattatcccagctcatgagtttttccagtacttaatctagcactaaaagtatctaattttattttgtatattacaataaagttttcttcatcatttggcagtgccacatccgttcccactggaatcacccctttcttttatttgattatattatagcacattatatattttaggacaagtatttttcagaaaattatttatattcagttttattttatgcacatttattttttatacaaaaatagccaatataaaaatcataatatctcctttgacaatcttataaataactaagatttcaaaaatatgattatatattggctactttaactactttttcttaaacatatcttctatcttttgtccgaaggttttcttcttttcgtggacgttcgacccacactccttcgcaaattctctcaatagttctttttgcttatcgtttaattttttaggaatttcaactacaaccttaacatattggtctcctcttgaattacctctaattctagggattcctttctctttaagtctaaatacagttccagtttgtgtcccctctggcacactatatttaacttttccatccaaagtaggtacttctatctcatcacctaaagttgcttgaacaaatgtaattggcatttcaaaataaatatcatttccatctctagtaaatagtggatgtgacttaacattaactacaatatataagtctcctcttggagcacctttttctcctacttcaccttgaccagaaagttttatcatttgaccatcatctataccagcaggtatatctacttctatagtcttaacttttcttgtatttccagttccatgacatttactacatggagattcaatcacttctccagttccattacaggcactacatggtcttgaacttgctatattaccaaatggagttctttgaacagttctaacttggccagttccattacaagttgaacaagttttctttgatgttcctggttttgctccagttccattacattcttcacactcttcacttctatttacttttatagacatctttttaccaaatgcagcttcttcaaaagatatagtaacactctgtcttatatctgcaccacgttgaggccctcttcttcttgctcttccacctccgaagcttcctccaaacatgtcaccaaatatatctccgaacatatcttcaaaaccaccaaagccttgaccgccaaatcctccttgaccaccaaaaccaccttgaccatttaatccatcatgtccaaactggtcataagtttttctctttgtatcatcagatagaacttcataagcttcatttatctctttaaatttttcttccgcctctttatctccaggatttctatctggatggtacttcattgctaattttctataagctttttttatctcttgagcttctgcatctttactgatacctaagacttcataataatccctttttgtactcaaaaattgacaccaccttcattttacaaaacgatagcttgtagaataataaactacaagctatcattaattcttatattctactttaagttatataatctatgatatattatattctttatgatgtgtattgtccatatatctttaacatctatatgattttcacaaatcatatatgttccaattatcatttagtgttacatattatatagcttatttatcttcatctacttctttaaagtcagcatctactacattgtcatctttaggtccattgtcttgtgcttgttctgcaccttgtgccgcttgttgttcttgagctgctttttggtacatttcttgagatactttttggaacttagtcattacttcatctgtagctttcttaagttcttctgctgtagcatcttgattatcttttacagcttttaagtctgctatagctttttctatatcctctttttcacctgaacttattttatctccaagttcatttaaagttttttcagtttgatatatagtagattcagcttgattgaatgcttctattttttctttcttttgtttgtcagcttctgcattcatttctgcttcttttatcttttgctctatttctgcttctgataaattagtgtttgatgttatagttattttttgctcttttcctgtacctaaatctttagctgaaacattaactataccatttgcatctatatcaaaagtaacttctatttgaggtattcctctttgtgctggtggtatatctgttaattggaatcttcctaaagttgtattgtcataagccatacttctttcaccttgaagaacatgtatatcaacagctgtttggttatcagcagcagttgagaatatttgagacttcttagttggtattgtagtatttctttctattatcttagtcattacattacccatagtttctataccaagagataatggagtaacatctagtaataataaatctttaacatcccctgctaaaactccagcttgtatagaagcacctgctgcaacacactcatctgggtttatacctttatgaggttcttttcctataaacttcttaacagcttcttgtactgctggtattcttgtagaaccacctactaataatacatcatctatatcacctgtagaaagtcctgcatcttgtaaagctgtcttagttggttccatagttttttcaactaaacctctagttaattcttcaaatttagctcttgataaatctatatttaagtgttttggtccttctgctgtagcagttatgaaaggtaagtttatgtttgaactcattgttgatgataattctttcttagccttttctgctgcttcttttaatctttgaagagccattttatcatttcttaaatctacaccttcagcttttttaaattcatctgctaaataatctattactatttggtcaaagtcatctccacctaatctattgttaccagctgtagctaaaacttcaaaagttccatctcctatttcaagtatagatacgtcaaaagttcctccacctaagtcaaatactaatattttcttttcttggtctaatttatccataccataagcaagagctgctgctgttggctcatttattattctcttaacatcaagccctgctattctaccagcatctttagtcgcttgtctttgagcatctgtaaagtaagctggtactgttataactgcttctgttactgtttgtcctaagtaactttctgcatctgattttaatttttgtaatattattgctgatatttcttgtggagtatatgattttccatctatatttactttataatcagttcccatatgagtttttatagaagttattgttttatctgcatttgtaactgcttgtctttttgcaggttctccaactattctctcaccatcttttgtaaatgctactactgatggagtagttctcataccttcactatttgctattatttgtgcttctccaccttctaacactgcaacacatgaatttgttgttcctaaatctattcctattatttttcccatgactaaaatcctcctcgagtaattatataattaagttttacttattttaatattttatattaggttaaataatttaacctttaatttatacttagcaagaaactttaaccattgaaggtcttacaactttagttcctagcttatatcctttttgaagtaccattactatttgatttgcttcaactccatctacactttcttgcataactgctagatgtagattagggtcaaattccttagattctgcttctatttcttctactccaaattttaccaaagtgtctattaattgtttatgtacaaggcttatacccttatacatagtatcttccttatcttcacatgcatctaaggctctttccatactatctataactggtatcaactcagttattattttttcatttgcaaatacgcctattgtctctttctcttgttgagttcttcttctgtagtttgcatattcggcttgaagtctttgatatttatcatttaattcatccaactcatcctgcaattttttttctgctaacttagaatttatatctgttacattttcatcatcaacttctttttcatcagttttttcacttgatgtttcacattcttcattaacaacttcctcttctaactctacttgagtttccgattcttggttaatagaagtatcattttcttctcttacttcctgttgctcattttttttatccaagactttacacctcgcaatttaaaatttctttactttctattaattaataaactcatataatttattatagagtaaattctagcataatccattctggtagggcctataaagcttattcgcccaaccaagtctctatctacattataagttgctgtaactatactacaatcctgtgccagttcacaatcattatcactaccaattattatatttagattgtctttttgtattccctttgatttaattatgtcagctattgtttcctttttttccaacatatttaaaaatgactttgcttttaatacatcattaaattctggataactaaatatgttagtagctccatttaatgatagagaaaaatcttcttctttcatatttgagttcaaagcatttaaaagctcatctataagtccagaatactcacttatttcgtatttaataaaagcaattagattatcatccaaatctgttatacttttacctaaaagcttccttgtaagattatcagaaatcaaatttaacttagattgatctaaatatacattagttgtaaggttagctttttttaagtcccctttatctgttacaactataagtaaaatattattgtcattcatagcaaccaactgtatgtgctttataacactttgatttattaaactcttagtaactgctacagttgtatagtttgttagttgcgataatagcttagaggtttcatgaatcaattcttttatatgatttatattatgattcatacattgttcaataagaatcttatcattatcatccaattcgcttttactcataagagagtttacatataacttatagcctttttcagatggaactctacccgcagaagtatgaggctgaattaaataccctaattcttcaaggtcagccatttcatttcttatggtagcagcactaacacctaaatcatgtcttttagatattgttctagaacctatagcttcagctgtttctatataatctttaactatagctttgaggatatttaattttctttcatttaattccatattattatacctcctagctgttagcactcactaagttcgagtgctaaaaagattatatatattatataccattataaatttattttgtcaacaccttaaaaattattccataaattctataaatacactattagatatttctcttcctttttgagttaattgtataccttcaaagctctgatttataagctttctagctaatagcatttctatttgcttattatacttctctctaaaatctattccaaatttttttttaaaatcttcaaattttatgcctttattcattctaagccccataaatatcttttcttctatcatatctttctcagaaagaatttcattttcttgtattggtttttctctttttaccaaacttaaatgataatcttctaaagattctacattattgtatctgttctcattaatatagccagaagctcctgctccaatccctatataatgttcacattcccaatataaaatattatgctcacaattatagccttcttttgagtaatttgatatttcatattgattatatccttttgactttaagtagtttattgtatactcatacatttctatatctacattttcatctataagctcaaatttattactttcatacatattatatagttcagttccttcttctagtataagggaatacgctgatatatgtgttggatttaagtgtacaactttttcaagagtttccttccagtcacatagagtttgatttggaagactgtacattaaatctacattaatatttttaaaacctacacttaatgcatctttatagtttttctcaaattcttcataagtatgtattcttcctataaaattcaaatgcttttcttgaatggcctgtagccctatactaagtctatttatgccaatctctttcatagtttttaatttttctaatgttaatgtcccaggattacactctatagttatttctgcattctcatctatatcaaacatttcttttatacttataaatacttctcttatttcatcagatgttagtatactaggtgtacctccccctacaaatatactcgttattttgtcatttttatttagactacagcattctttatttttatatttattatctttatataatttattactatataatttcatttctatttttaagtcttctatatatcttttttttgaatctatgtccattttataagaattaaaatcacaatacttacattttttcacacaaaatggaatatgtacataaagtcctagcattttttattcctcatttcttaaattatcttaaagcatcaattactaaattataaatcaaacaaaataacacatcaagtaatatataatgcttatattgtataacagtataaaaaatttggataaaagttaattttcacctttacccaaatttatctaacttaaattaagtagttatctttttttcatataataataaactggtaaacctaatagtgttataaatattccacctaaagatataattgttgaagtcaatatttgatttattattacaaacagtccacctagtatagctataattggtattattggatataaagggactttatatggtctgtgtaaatctggcttttgtcttctaagcctcataacacctataaaagtcaatacataaaatacccatattgaaaatatagttaagtctgtcaaaagattaaattgaccagataatgcatatacacaggctaacacagttataagtagtattgaatttacaggagaacctccagaatttacttttaaaagagttttagatgctggtaaagttcccatttcagctaatgtataaggtatccttgaacctgttaataaatatccattcaatgtcccaaatactgatattaatatacccacagttattacttttccacctatatttccaaacaatcttgttgctactaatgtagctggggaagtaactgttgctaattcacttgctggtactacccaaagataagctatatttattataatataaactgccataactaatgataaaccaccaactattgctcttggtaaatctttctctggagacttcatttctcctgatatagctccaacatttatccaaccatcatatgcaaacaaagtagctattaatacttgtccaagtgcatttgatgcatttacaccatctcctacaaatggatttaatacttcactactttgacctttaataaatccaaagactattattaaaattaaaggtatcatctttccaatagtggctactgtctgaacttttcctcctaaggatgaacctattatatttaataacgctaaaaatagtataactccaattgctataggaagtacatttgccatattatttgggctcattcctaaaagttcagatgcttgttgagcaaatattactcctaatgctgctgatgtacctgggaaaaataatacagtttgcatccatccagttaaaaagcctaacttttctccatatatttcttcgatataaatcatcataccaccagtttttggtatagcagctgaaatttctgtagctgtaagcccagcagttattgttataaaaccacctaaaagccacgctataatacctagacctggagctccattagttgtagtgtatattgcttgtggcttaaaaaaaactcccgaacctataaccatacctacaacagtagaaagagccgctgaaagaccaatagtcttttgtagttgagtatgcatactgtccctcctcactgttttacagtatataaaatattaattttataaatttatggttttagtattcccaaagtttttttttatattagtctatagtcctagagtaaatgctatgcgtttaaaaatcatacaatcgtaacttctaaaatattctctaaaaattatttattttatctaaataagtattttcttctataattttttaaagtaattaaattttttatatttgaatctaaaatgtatatatatttaatgctttttcttttagtatttctttttcatttaattctggattatttatgactatttcaagcatcttatttaaaatatgtcctatatctttacctggttttatacctatagatatcaaatcttttccattaatagctaaatctttaagattaaagcactccttttgatttattatatgtttaaattctttttcacactcaataagatttaatatcttttgttttgcatactttgggtttttggcaagtgtatcagcccaattaacttttattaaatcttcaaataattcaacatcttcaagtttatttaataactttttaattatcttccttttaggttctattctataatcatgatattgtattaatattaaaactttattaatagtataattatcatacttaagtcttctcaaaatcttctttgcaatctttacagattctctactatgagtataaaaatggtcaacaccatttttatcagttgttttagttacttttttacctaaatcatgaaacaacattgtaagttttaaatacagttcatcttcaattacttctgtagatattaaagtatgtttttgtacatcatagatgtgatatggattgtgttgagtaacatcttctaattcacatatttcaggaattataaatttcaacaaacctgttgattttaataagtttaatttagatgaatcagatactaatattttattaaactctgtctggattctttcgatagaaacattttttatcaaatctgcttttttatgaatactttgcttagtaccttcagctattttaaaattaagttgtgctgaaaatctaactgccctaagcattctaagtgcatcttcttcaaatctatctactggatttccaacacaacgtatatacttattttgtatatcttcatagccattaaatgggtcgactaatcctgtctttgaattgtatgcaattgaattgatagtaaaatctcttcttgacaagtccttaactatgttatttgtaaattctattgaatctggatgtctaccatcactataatttccatcaattctataagttgtcacttcaaatggttcatgttcaatcataactgttacagtcccatgttgtataccagttggaattgttttttcaaataattctactaccacttctggtctagcactagttgttatatcccaatcgtttggaactctttctaataaacaatctctaacgcatcctccaactacataagcttcataaccattcgtttctaattctttaattatatagtctacttttttaggaatttctatattaatcataaatatcacctttttattcttctttaatatattcttacttatattctctatgagtttacttaaaatataccacaaaaaagctagattaatttagaaataattctaaaatcactctagcttttaaatatatttatctaaatttataagaatttattcatctagtttaagtacagacataaatgctttttgaggaacttcaacagaaccaatttgtctcatacgcttcttaccttctttttgcttttcaagaagtttcttcttacgagatatatccccaccataacatttagcaagaacatcttttcttagagcgcttattgtttctcttgcaataaccttattaccaacagcagcttgtataggtatagcaaactgatgtcttggaatttctccttttaatttctcacacattgcctttcctctagggaaagcacgtgtctcatggacaataaaactaagtgcatccacttgttctttattgattaatatatcaagttttacaagtgtagatgctacataacctttaacctcataatcaagagaaccataacctctagttctcgattttaaagcatcaaagaaatcgtaaacaacttcattgagaggaaggtcatagtgaagcattactcttctctcatctatatattccatatttaacatatttccacgtctttcctggcaaagctccataacaacacccacatagtctttaggaactattatatctccttttactataggctcttctatcatctttatctcagatggttctggtaagtttgcaggattttgtatcattacaacctctccatccatttttgtaactctatatataacagatggagctgtagtaattatatcaaggttaaattctctctcaagtctttcttgcattatctccatatgtaaaagacctaagaaaccacatctaaaaccaaatcctagtgctgctgaagtctcagcttcatattcaagtgcagcatcatttacttgaagcttttcaagagcatctctaacattctcatacttttctccttctcctggatatataccacaatataccattggagtagcttttttgtatcctggtaaaggttcttctgtaggattatttgaatctgttattgtatcaccaacacgacaacttcttatatcttttatactagcagcaatataaccaacatcacctgctgataattcactaagttcagtttgacctggagccataacaccaacttcagttacctcaaactttttattggtattcatcatttttattgtcataccctttttaacagttccttcaaatactctaacataagctacaacacctttgtaagcatcatagtaagaatcgaatattaatgcctttaatggagcttcattatctcccttaggtggaggaacattttttacaatatcttctaaaacatcttctatgtttaaaccagttttagctgaaataagaggagcttcacttgaatcaagccctattaaatcttctatttcattttttacttcctctggtcttgcacttggtaaatctattttatttattattggtaatatttctaaatcttggtctatagcaagataaacattggctaaagtttgtgcctcaacaccttgagctgcatcaactactaatagtgctccttcacatgcagctaaacttcttgatacctcatagttaaagtctacatgtccaggtgtatctataagatttaaataatattcatttccatccttcgctttatacattaatcttatgttttgaagctttatagtgattcctctttctctttcaaggtccatattgtcaagtaattgacttttcatgtctctttcactaacaagcccagtttgttgtattaatctatcagctaaggtagactttccatggtctatatgtgcaattatactaaaatttctagttctactttgtttattgtccaccttaaaattccctcctcttgattattcttatagttattattttacattatctaaaaactctttatataccaaatttaaaatttttgaatataaactaattggcactaaacaaaattatccacattatatgtggattatcaagtctaacactaaatattatataatatcgtaaacttaaagtaaatcctataaaatacagttaatgaatttttattttatacattaaaaatatataactaaaataaggcttattttaatcaataaaccttattcacttattactacttattaaatttttttatgatttcatgtatatcaaaatttggtatgtcaaaatcaaattttgttatatcaaatttaatacttggaaaatcatattgtttcattcctagcatactttttgcattactgtctactataaatacacaaactgatgtacctataatcatagtaatcaaaaataagattctcataatatacttgtattttcttagtttacttttactttctatatttttttctaatcggctcatttagcatgctcctaattataacttaaagctctaatttttttgtttaaaatattcatctaaaatctcggctaaatactttgtagtagccttagattcttctacacttgttgcgttattccctatttctactaacatatgattcttaactgcaaactgattgaatctagcatagtctttttctactattggagatactagaccaggatactttttctcagcaaaagcagttatatcttctgctaaagctctaagttgttttctatttgtatttttacctcctacaacaaagaagaactttgatactctctctccatttatcatagttgtatattttaaatggtctttttccttagtggctggattagttaaatccctagcatctctatgtaagtctatcgctatatccactgagttatatttaggtaatatactttgtattgtttttaagctacttgcataagagttattataagatggatagtcatggtatttagtagtatggactacaccccatcctttgctatctaaagcactagttaatgcacttcctacttccattactgaatttttcttatctcttgaatgataatttccatcaggtgaatttgaataagtctcacatccatgagtatgatatatcaaaattcttggattttctttggttactcttaaatcatccttataatctgaactagatgttgtgttagtttcagttgtgtctgaattttttgactcaatatctggaacattttctttaccaacataaagttttatatattctttttcactctcttttttattatcaactttacttgcatctttagatttagtgttttcttctttactttcttccttattttctttgcttgtttctttatttttattattctttttattttctgtatcatttccttcgactttagcttctggataagatgaatttactaaaaactttaaaaaatcatcctgattcaaagctaatgattttcctggtaaaatgcatgctaatataaaagtcaaggttactactttaatgcattttttaaacataattgctcctccttattttataccaatctacctggatgtaaagacctatttaagccttcacttattattatagatagattttcgattgtatcatctatatcctttggtgttactattaagttcttgtcatatgggtctaacgaatcttttattagatgatatttttcttcttctttaagttttttcaacatttcataaaaactttctgtttcttctgattgagctattaaattgtctattgccatatctaagacatctattgtaagagttgctgcatcaaccaccgttggaacgcctattgcaataacatccacgcctaaagtttctttagttagagattttctagtattgccaacacctccaccaggtgatattcctgctgttgatatctgtatagtagagtttactctttccatttttcttgaagccaatgcgtctattgctactactctatctggttttactttttcaaccaatgactttactatttcactagtttctattccagtaacacccataactcctgggcttaaagctgatacctcagtgaaatcatcatcatagtctttattataatttttaaaaagatgtctagttacaagtgtttttgatacactctttggtcctaacgcatcagaagtaatatttctatttccaagaccaattaccagggtttttttatttttgtcttggccaaatatatctactaactcctcttttaaataacttatcatttcttctctcgactcatcatcatcaaacttcataagattactttccagagttatatactttcctatatctttattcattatctctgcgccttgcctgtctattacttcaactttagttacaatgcaattttctaattctttagtttctatttttacaccaggaatactacttccttcttgagacttttcacacatttcactagcttctaaagctaaatctgttcttacattaatcatataaacctccagtataaattaaatgctaattataattgttaacaaaatttagtattttataacaagaaattgtaaatttatttaaaacaagtaaaattaaggctttcaatgtaagaaaattgggtttagtcagtgatttgtcagtaaactttcttatctatcatttatttacaagcaaaaaaaggtagcaactatttatataggcgctacctttaatctatttataattttcctattaagctttcactaatatattaactaaaataacttttttatatttatacctaatttatttactatataaaaaaacagcaataattatacaataatcacctaacacctttattccttttggaaaaatggttctgcaatttccaaccattcatttggaagataaagcgataaatacccatgattatagcccttagcttcataaatctcacaagagggtacataagactgaaacatttttgcagattttttaacgcacttcatttctttttctccataccagtacattacttgtgctgtggtttttttaacattctctttaagtgtatagttcatcatataagtacgatacatattatagaatgtttcttttcttacatgtggcatatctgtcatataatacgcttttatttcatctggatattgcatattttcaggtaacaattttggcatcatagcaatttgaaagcgacaagccttctcactaaacaaaagtcctccaaaaaatcgaataccagcaatacaaaaccttgccataagaggtcttgggtagcaaatactaccatcaataattgcttttttagtaatattaggttttcgagataaaagttccatgacaatttgaccaccaagtgataccccacacaaagcgaaaagatgtccactgcaattttcatctatatatgatatcaacttatctgctgtatcctctgtagaaatgtatgttgtttcatattcttctccatgaccatccaatgtaggaagtatcacatgatagttgttagacaaaacttctgcttgtcgcaaatagttccaccacgcattccctcccccatgaatcaacataatatgtggtttgtttttatctccaaattcatgaaatttcatatacaacctccttttataaaaataagattcatgttattttgttttatcattatcaaccacaggtggagaagatataattgaaagttttctaagttttagatttgatttaggcttttgttctatatatggtttcaataaatcagctatacttttaagaagattttcatattcattatcactcatatatagtaatgctgaagagaaaaatacattatcctttttatggtcttgctcttttctgctaaagtattcattcatttcctgcatcagacctacataaaatgctgtagaaagtgcaacgaaggtctctccttccatagatgttgtatattcctttagtgcataaaccttttcaatagtaccacgcacacgattttctttaattacttcaatcatattgttctcttctaaaatttttacatggtgataaactgttgcacgaggaatatcatttaaatactttacaatatcagatgtgcgagcactgccatgaagtcgaatatattgtaagatacgaagccttgcaggatttaaaattagttttgctatgtccatcttatcagccctttctttagtctataaaaatattatagtctatttttttagactattcaagtctatgatataagtagtaattacaactataataaatgctacaaatgctattctatataaacactgagattaattacatataaccttctaacatattagttatattgtttgatgcatctatcatacatactaatgaaaaaaattatcttgattattggaaaaattatcttaattaagcatataaatttatatttttataatttttcattaaatttacaaaaatgagtaatttcttgtattttcttataattattggaaatactatcaaaatgtatgttaatagtttgtattatctcaaaatatttgttacaaaaataaaatattaatttatatatgtcaaaatatttaaaacacaaaatataccaatttaaaaacaagatattgcaaattatttatacacaatttacagtctaaaaaatcaaaataaaaaacattattaaaatatataaataataatccttgatttttagatttatttctgttaaaatctaatatgttgacgatgaatatgataaaaaaatacagggaggtgaacacggtggcaaatataaaatcagctaagaaaagaataagtgttatcgaaaagaaaactgctttaaatagagttagaaaatctcaaataaaaactgcaataagaagattcgaagatgctgttgcagctggaaacagagaggatgctgttgcaaagttccaatacgctcaaaaaagaatataccaagtagcttctaaaggaactatacataagaatgctgcagctagaaaagtagctaaattagctcaaaaattaaacggtatgaacgcttaattaccagtttatatttcttatatataataacccctatgtaggggttttttattttgtaaatttatacaataaaaaataaatagttagacatattatagttgattgtatatcaaacttaatttagcttacatctactctgaactataacatatcttgctatttattttttattaatatatagattttttaaattgcttctcttttacagtatctactaaccaacatttcaactgctaaagtatctcttataagacctgtttttattttataatcactttctaatatatagtttaatatttccacaattatatcatcagaaaaatttttagtttgctttaatgcttttcctacaacaaattgatgcatttttaatttatcagctataagttttgttgaatatccatcaagttgtaactgtcttacttgcataattattttaaattgtcttgctatcatagaaaatatacctaatacagattcgccttcttgtatcatatcatttaatattttcattgcattagaagcattttgttctccaatataatcgattaatttaaatatatcattctcaacttttttttgagataatttatcaattacgtcattggttacattattccctttaccaacaaaggaacttattttatttatttcattttctaaatcagataatgtcttttcactgctcttatctctgtatccttcttgttcaataaaatacatgatttgagaattatctattataacatcatttaaagcaaaagatttttttatccatttaaataaatccatatcagaaagcttatcacaatcaaaaacaattccattgtttcctattttcttaactaatgattttcttttgtctacatctccatatacaacaaaaactatagttgtagtgtctggaatattatctaaatgctctattaagtatttctcatcactatctgtaaaattctttttctttccttttaatagttcgaagtcttttattattactatctttctatcatccataaatggaagtgtttctatagagcttataagctgatttaagactatttccttcccatctattatatctaaattaaaatcaagcattccttcgtttagactatctttaaatgcttttattgcattctcaattaaataatactctcttccataaaaaagatacattttttcaaagtttttctcttttacattccttataatatccttgtaattcattctcttgctcctttatctcttttccttctatgtaaaatatgtaaaaaaacactcctatgtaataaataacaacaatataaaatttaggactttctatattaatgtatgcaaaacttaaattgctgattttttctagtaaaaaaaatatgctttctatcaatgtactattaaaaaaagatataattttagctattactacacttactttaaatacgattaaacttgcaatacttaaatacattattactcccacaaatggtactataattaaatttcctataattgaaagcaatggtatacctttaaatgtataataaattataggtaaagttaatatatttgatgatattgtcaatgataccatacttaattttataatactatttattttattatagaatattaatatagaaagtgtagctaaaaaagacaattgaaaacttacattatatataacataggggttattcataattaaaattatcccaattagagacaatgctgatattccatctttctttctatcaataaatattgataaataaaaaatcataacaaatgctatagacctaattatggatggagacgcacctaccattatacaatataaagttataaaaatcgacagtattaataatttatacaatttatttatacctcttaatagaaaggatataattacacataatattcctgtatgaagacctgatatagatattacatgactagttccagttctagtaaaaatttctttttgttcctcagtcaaattttcaacttctgctaatagtatagaatttataaaatctgagtttttcttatataagtacctataagttttactaatataaaactttatttcccctattaaagagtaaagtttatttttatcaataattttatagttatttatatacactatacctttatatccagtactttttatataccttccataatcaaaatcatcatacttcattttatctaaacttttgaatttacctgtaatattaactttctgaccaatcttcaaatttttattttttgtataatcatttattagaaaaacccctaccttgtactgattgtatcttttcttttcaatttttcctttgacaaccccttgtatagttattatcttatcattaagttcttcgtcgttttttgtgttatttgtaatgataaatgatatagctaccacaaacattaatataattaataatggtcttcttatttgaattataatcactcccatataaaagtatattatttagattattttcaaatagaaaatttttaaacaagataaattgttatctaaacaaaaaaatacgtcaaaagatttttaaaatcttttaacgtattctacctatatatattcatttatataggtattttttttagaaaaaatacaattaagtgtttctagtgtttcttctgaaacatcttttatatcatttaagaaaatagcttcatttacatctatataagaaaatgataactgtgttaaggtatttatatctaatttaatatcaaaatcttcttgaggcttttctgcaccttttttatctaactgctctacagataccttcttattctgtatagaaattttaaatagaccattattttcatctataaacttgtcttctattaataaattaaatgagctattaatatccttctcaatatctatatcttcaataaacttctttacatttataactcttcccatcataaaaggttttatttttatatcactatctttagggttgtctaatataaatcttatcttatctattgtaggagtagatatagtaactatcttacattgagtattgtgattatatataaatttaagcattgatttaagggcatctatatttttataaaataactctctgacaaacattttatcttcctgaagaaaataaactatatatccatctttttcatttccttcatgaatgtataaaaatccatcttcactttgaatctctttaaataagttttcataataatgttcatcttttaacacattaccattaacctcatttaaaaaagttctatctattcgtatcaaatcatcaatttgtgataaattagactttatcatttttccacttgacttaaaattttttaaatcatctgtgttaatagtatattcaatctggtcgtaacaatgctcatatccaaatcttctataaagtctatagtcaataggcatcaatatagaaactaattgcccttttttatacaattcgtttaaagtaaatttcattactttgttcatatatccagctcctcttccctctggaagtgtagaaactcctactacatatgatgtattatataccttgctatttagtaataacttatactgatttagctgaagagaagaaataatttttccttcatctaaagctactacagtattttcagatttatatttatcattaaaatagtacttcataaaactctccgtatcgttaaaacaataactccaaatctcttttatactttctatctcttcttctttagcatacctaatctccatatagtctattaagcctccctaacactgtacttttcaacaaatctgcaaggatgataagaaagtttagcttttcttaatccttcaatacctaaatcttcttctctatttacaaactcaacgtccttaaattcacttaccaaaaattgttgatttataaatggatacagacctcttatatcgggattagctttttctatatgaatcaatgccatatttggatttaaaagttctcctatactaaaagcctctaattttccatccacataaacaccaaacacttttaccttatcttttaatatgtcataatggttaaatatctttttgatacctattaattcgtcatccatactttcatcaaattcattattttcttccttattactttcccattccttcattagtactaaacactcgtcaaagttttctttatctaataatttagcttcatatctacctgcatactcttttaagaaatagtttatatggtttctcttcttttgattctttttaccagctagagttcttaaactttctgcatcataaatatagtcaaataaatctctttcttctatatactcaaatctacctggatatttttcttttaaaaactctactacttcagtagtaatacctcttaagtatatttttttattatttttagaaaaatattcaaggacaaaatctacaacttctggaagtttatcttttttagcaagtggtaatattgagaaactatctccttcgtattccccaactaaaacggcaaaatcttcacctatataatatcctgtcttataaacatgttgccacatatataaagtactaaaacagtactcacaagcttcataatctactaaatcaaaatatgggtctaactctttttttgaatttagttcaatatctttgaaaaacataaaatcctcctaccttttttattgcttaattttaaaaattttattttgtatatataaaaaactccaaatttattatggtattaatttcatttatattgtttaaaatataaaatataataagtcatatatatcttatattacccatcataaatttatataaacatgtaatgaatggagtgattttttattgagaaataaaatttttttatcaatacttattataatatcacttttaatcggctgtgacaaaaaatctctactatctatacatataattgatgttggacaaggtgatagtattttagttcaaacacccacaaataagaatatattaattgatggaggtgatgaagatagcgaaaatataattattagttatcttagacaaaaaagaataaaaactattgatattataatagcaactcatccagattcagaccacataggaagtcttgataatgttataaaaaaatttaatgtaaactccatatatatgcctgaacaatcaactgatagtgaggcttatcaaaatctaataaattcttgtacggataaaaacttatctattcagcatctctataaaaatgatgttttaaacatagataacaatataaatatatatgtattaagtccatcatatatacaagaagaatctaatttaaattctatagttttcaaattaacttttaacgataattcttttttatttatgggtgatgctgaagaagaaaatgaaaaagaaattttacattcttttaaattaaataatattaattttataaaaataggtcatcatggaagtaattcttcttcatctttagaatttataaaaaaaattagtccagatatagctgcaatatcatgtggatataaaaatcaatatggtcatccacatagggaggttattaataatctaaaacaaaaccatgtatcaatttatagaacagatagaataggagatattgttttttatagtgatggagaaattatatttacaaaatataattatgaaatagatacataatctaaaaaataaaactacaactacataaaataaggtaatataaaataattaggctaaaagtatgaatataaaattgctttatattcatgcttctagccttcaaatttgtatataaaatttataaattaaaatatttaaaacttattgtcctaatagttcatttactattacagatgcgattattaaacctcctacagatgggacaaatgatacactaccaggtgttacttttctaccattcattactttcttcttaagttctattggttgttcagtagaatatactacttttaactttttgatacctctatccctaagttctttcctcataactttagctagaggacaagtacttgttttgtgtatatctgtaacgactattttagttgggtctaatttatttcccatacccatagaacttattattttcaacccttttttttcacaagtttcaattagatgtattttggaacttaccatgtctatcgcatccacaacataatcatatctttcagttagtatttcgtcactagtatctttattataaagacttcttattttttttatattgatattaggatttatatctaatattctttcttccatgacatcaactttgtaccttcctacagttgaatgtagggctggtatttgtctatttatattggttatatctacatcatcaaaatctacaatagtaatattgcctactccagctcttgctaaagcttcaacagtaaaactaccaactcctccaactccaaatactattatatttgaattattaagtttttctatcccatcatctccaactagaaaactagttctcgttgtaaaattattttccatctttccacactcctagatttttatctaaatatataatagtattagaaaatttacattatataatacaaaacattatatattattaaaaataaattatcttaaaataaatttaaaaaggtatcttttaattaaaagataccttttgcatattggcgggaatgcgtgggaatcgaacccacctaagaggctcttaacccctcatactagttttgaagactagagggcacaccggcacccatccactcccataatgaaatccttctcaacgaaatctataatatcatatattttgactctttgcaacaatttttatagatttatctgatagtaaattataatttaaatagcttttatctatacatggttaaaatttacctgttttattacatatccaaaataaaaactggaaattatattttaagaatctataaagagtttcttctctatataatcaaaatataatttccagtaaaaatataaattatttaactattttaatatacgtatatctatagtttttcttccccagttataaaccgtttttgaatcattcatgtagatatcaattttatttccttttattgctccaccacagtcttctgcagtaaacaccatgtcaaattgaggtatataaactttagttccatatggtataaccttagggtctacagctattgttccccacttaggttttgttcctgttgcagttatactatgaccagtatatgcagttgctaccactctcatatttttaccattgttactactactgctactagatgatgatgaagccattcttcttgaactttctccccttgatgaggctacttgcatttctacctttgtccctttgcttacaaccttatttactggctcagctttaacaacctttttcacaaattccttttcaactttctttccattgtgataagtttctttatatattaattcacttttaccagactttccttcttctttaaccttagaatcaccctttaataaagagccatcttcaacaactgtaacttcaaatggaatgtctttagtttctacaactgttttttcctttacatcaattacttctattttatctccattagataactttgtattttcatctaaagttactatatcatttgcatcatagctaatgttttgagattctaaaaggtctcctacattagaactaaatgttgatatagttctttcttctccccttactactaatgttacttgtttattaagcgcagagtatcccgataatattccaactgataaaacaactgccattaccgagactttagcattactcaattttttaaaattcatataaaatttcctccctaaaattttttacactatatattttgcttcataaaattctgctttgtaagtttctttttttatttgtgttttttgtgtaactaaattgtaactattttttcaagagttgtcaacttgacaaaaaaatagaaatatgcatacatagtattttcaactatttaagcatatttctattagttacaacaatgtcattgtttattgttgttttgttatcattttgttaccttttacttttatatattttctatctgccaattaataggttcttttcctagctttttcaaaatttcatttatcttagagaagtgtttacatccaaaaaagcctttacttgctgacaatgggcttggatgaggtgcttccaaaatataatgtttacttgtatcaatcaactctacttttttacgtgcattacttccccatagtacaaaaataactgggtcttcacgctcacttaaaatagatattactctatcagtgaaaatttcccatcctttgttcttatgagaattagcttcatgcgctctaacagtaagagcagtatttaaaagtaacactccttggtctgcccaaggcattaaatatccattattaggtataaaacaacctaaatcatcttttaattctttatacatatttaatagagatggtggagttttcacttgtggttgaactgaaaaagctaaaccatgagcttgattatctccatgataagggtcttgtcctaatattaagacttttgtgtctttgtatgaagtgtgttttaaagcttcatatatattgtgcatatttgggaaaatttggcgtgttttatattcttctataagaaattttcttaagtttaagtagtaatctttttcaaattcttctttcaataattcatcccaatcgtttcctaagttaaccataattatcaccaattcctttcaattatttttattattttatttagaaattatatcttcttgattatcattcttttcatttgtatttatttttatgctcactctattaggtatacaaactatgctttgacttggcttgtttataaatccagtatgtacgcaaaccttatcagggcatgaagcatctactatctcaacccctttatcatgaatctttactatgttatacccccctctattctctattttaaattcttctttggcatttattgaaacagttttatacaatttattatctacataaatctcaatatttccagcatttttagaatttataacatttattatcccataacatgctataataacaaccaaaatgcctaaaataagaagaatgtcttttttcttcattttttgtcctcctatgaaattatgttataataaaataataacacaatttcataggaggaatataccatgaataagaaaaaaatcacatttatttttgtgatattgattttagcattaattttattttcattttttaggagttcaagccagaatactaaatatagtaaaactagctactaccttggtacagtaaacgaagttactatatttaatgtaaaagaatccaaaagtgataaaatcttaaatgaatgtgattcaattttaagatatattgacaacaaaatgagcactcatataccaggaagtgatgtttctaaaataaatgataatgctggtaaaaaatttgtcagagtttctgatgatacatttttcgtcgtaaaagaagctatacaatattccaaattatcagatggatattttgacataacaattggtccattatcaaatttatgggctattggaacagataaagctaaagttccaagtgattctgagatacaaaaacttctgcctcttattgattataagaacatcatattggatgaaaaaaataaatctataaaattaaccaaagaaaatatgaaaattgatttaggtgccatagctaaaggatatgctgctgataaaattgtagcctatttaaaatcagaggacgtaaaaaaaggtttagtaaacttaggaggaaatatatttactttagaagatggtaaaaatgataaaccttttaaaataggcattcaagaccccactagtaaaaatggtgaatccataggaaacatagaaaccacaaataaatctgttgttacttctggaatttatgaaagatttatcgaaaaagacggaaaaatatatcatcatatgttaaatccatttacagggtatccttttgaaaacaatctaagtagtgttacaataatttctgataaatctattaattgtgatgccttatccacttctacatttggacttggtcttgaaaaaggtatggatttaattaatgaaattgataatgtagatgctatattcataactaaggataagaaagtatatttaactaagggtataaaagataattttaaacttacagataaatctttttctattgaaaaattaaataaacaataagtttaaataataattatatctattatacatacaaaatacatatgaatttaaatagttatcacatgactaatgcaaatttaatttttatataaaatatggtatatacttaagtaatctaaaacaaattctacttatgtatataccatattaatagcttaaatttatataaaatactaattcaaccaaatttttataaagactttaaaaataaatccattctatttaaagcttcaattacattttccttttgagttcctaaatttattctaacatacttctcaccatcttttacaaaatgactcccatcttctaataatactcctgtatctatagccaatttatctgtaaactcacttgcacttatacctaatccacttatatccatccaagctaagtaagatgattccattttcatcaattttatcttattatatttatttacccaagtttctaaaagttcataatttgattttatatattcatttacaccacttaaccactcatgacattcattataagcggttatcaatcctattattccaaacacatttggagaagttatagaattttgctttaatttatttctaaatttatcccttatattcttatttataactattgaataagaagtctttaatccaccaagattaaagcccttatttggtgatgtcagtagaataacattttctaaaagctcttttccaatcttaagtattgaattaaatttaccataatgaatatgctctgcatgtacttcatctgcaaccaaaataacattattttctttacatatagttgctacccttgtcatttcttcaattgtccatatccttccagatggattatgtggtgtacaaaacatcattaatttaggcttattttctttaatttgaacttctaatttatcaaaatttatataatatctatcatttacaacatctaatgtattacaaattacatttacaccttgtttttttgctgatgattcaaaggggtcataaactggtgtgtttaatattatactatcacctttcttacaaaaagcttgtactacataatgaagtgttgatacagttccataagttaatgtaatccattctttttctacatttacctcatgcatatttttttgccaaccaataactgaatcataaaattcatcataacagtatgtatatccaaatacacctcttcttacagcttcaataaatttgttttctatttctgttggtattttaaaatccatatcagcaatccacattggtacaaaatcttctctaatatctccaaatttatctcttataatatttaaatcccattttctacacttttcacttactctatctggtttatcatcaaaattatacatttaaatttacctcttcttttcttattgttataaaatatttatctaatttatttttagcttacaactattaaatccttagtagatgtagtcaatctcatacatccatcttgtgttatgagtacatcatcttctattcttacgcctccaagacttggaacatatataccaggctctatagttacaatcattccttcttttaatacttcatttgattcaggagctaaggcaggatattcatgaaccataattcctacaccatgacccagattatgaccaaaattattggcatatccatatgaaccaattatgtctcttgcaactttatctatctctccagtagtcattcccggtcttaaaactcttatacactcttcattagcttttcttactatattatatatttcttctaactctttatttatagtacccatacaaatggttctggtaatatctgaacaataattattatacttagcaccaaagtcaaaagtaacaaaatctccatactctataattttttcacttgcttttccatgaggtaatgctcctctaagcccagatgcaactattgtatcgaaagattctttttgaccacctaaatcttttataattctaacaatttcattttcaacttgcttttcagtcataccaatctttataaagtctactatatgataaaatgtagcatcaactatttcacaagctttttttatatattttatttcgtcttcattttttgtttcccttaatgtagataaatcaactgattttaaggttgcacttaacttattactcatacttctatataaatcaaaagatacttcatttccctcaaatccaatttcctttatattctgctctctacaaatatcattaattatatcaaaatgagttctagttttgtccattaatactacattaaacaaactagattttcttttaatttcttcaaaatatctaaaatctactattatatattgtgattctttcgttataaaaacataacctgaagagctaaataaatttccaacataaaacttgtttgtaggactatttataagaaatccatctatatcatattctctaaaatactctcttactttttctatcttatccatatcttatctccaccgcctttaattaatcatataggtaaggctggtaatattgattaaaaccatattaccagccaaagttatttatagatagtaaaaattaaatactagtcgatataatctacaacaagtttaccatcttttattaatttatttctatagaatatatttcctactgctatgaatatagcaccaactgctatacctattatatatccaaataagttatctactagaggccatgcccatatagctgactctgggaaccattgaattgctcctagaattatacctgtaatagctcctattacacttccaactatgtttaaaggtataacaaaacctggtctctcaagtgcaaatggtattgctccttcagatatacccataaatgataagaatatagaagtttttcctgcttgatagaattgtctatcatatactcttcttcctactaatcttttatctaataatgttgttaatcctaatccaattggaggaacaactatagctattgttcttgctgttattggaagtacattctctgtagttaaaccaagtgcaacgaatcctgctgctttatttattggtcctcctaagtcgaatgctgtagctgctgccaaagctgttgcatatacatattctccagctgctcctgctgctgttaagaagtttttcatactttcattaattaatccaccaaatggagttattataaatatcatcaataccatacaagctaatgacgctattaatggtattaaaaatgttgttttaaaagctaaccagttatgagaaacttttatagatttatttaaccattttacaaaatatcctattatgaatgctattagtattgcacctaaaaatcctgatgcaactggaacaacttcagtccattgtccatcaatgaattgtggtacacctacaggtttattagctatatatccacctataaatcctgcaattaaagctgtttttccacctatagagtttgcacaaaatgctgcaaacagtggtatcgcaaatccaaacaaagtaaatccgaaatttgacattaattgtgctatatttaaaagactaagcttgaaccctgtaaattctcctgagttcatagcatcaactatacctacagatgggtcaagtcctaatatagcatatggtattaattgagataaggcccctataagtccacccattactaaaactggtatcatatatgatatacctgtcattatatgtttacttatttctttccattttccatttccctttgattgagttggactagatggagtagattttcctacattatttcctcctgttgtagaagcacctgaactgtttataacttttttcttaattgccattctatttcctccacaataaatttattatattcctaaatcttcttctatttcttttataacaccttctgcattttttatagcttcttgtaattcaacttcataaacttcacaaccatcaaatctttccataccttctggtgttattgctactgcatgtattatcatagttgctcctaatatatcatctcttgttaactcattttgtacaccatcagcaccttgagtttcaacttttgcttcataacctaatgcctttgctgcttgctctattgcttctgctgccatgaaagtgtgagctagtcccattgggcaagcacataatgctactaattttttattcatttcaaattcctcctatttttagttaattatttttttattttataaccttagtatttaattataaacctaaagcttcatttattaagttagatatttcttcaacattatcactttttaaaagagaatctttaaattctttatttattaattttcttgaaagagatgataataatttaagatgaatattctctttactttttcctggcataagtaagcttattgctaatttaaccttatcctcaccttcattccaaacaacatcttcattaaacttcaatactactactgctggattttcaattgcatcatttttagtgtgaggtattgctatagattctcctaaatttgtagtaaattgttcttctctagccattaaaccttcatatactaagctctcatcttctgccaaatttaagtctttagctttttttgatataaattttaaaacttcaacctttgacttagcatcaacatttaaaaatacatattctttgttaaatatgtttgttcccattattaatttcctccttaattacctatcagtgccattaatttattaaagtcacatattttaataattcctcttactcctccttcatcttttataaaattataaaggtatttaaatatcgagaaattatgcttttctttagtattaaaaaataccataaatactagctgaacctcttgcttatcccaaattattggattttcaagtattccaactcctattatagattttttatctcccttcactattgtgtgaggtattgctactagatttcctatttcagttgatgaaatattttctctatctattatactttttatagaactttcctctataaaatctctttcttttagtttatttgaaagtgaaattatgacctcttctttagtactagcctttatactgaaaaaagctttttcatcaaacatgttacttattatctttcttctttcttccttttcataaaaggctttgtttacgttttcaattaagctatcatcaaatatattttctatatataagacaggtttttcatatccttttaattcaacggtagatactatcaaatcaacatcttgacttatagccatatcaagatatctaactggataaacacctacaacacttaaatcacttatattctgttttagcttttcagaaataagttgtcctgttcctatcccataatgacaaactatacaaattttcttactagtattttttttcattctttcatttgaagcagcaaagtggatagctatatatccaagctcatcttcatcaagttttaaattaaactcagtttctagtttatttgataaaaacacggctaaattaaaagctataggaaacttctcttttatttgatgaagtaaaggattatttgattttacattagctctagctctatttaaaaatctctttatatggtcagagattgcaaccataaactcatcatcttttgtataatcactacctgaaataaggaatatatcttgaagtgcactacttataacactacttattcgttcctcaatttcacttgtgttttttcttccttgtgtacctttataagctattacaccagaataatttgaaatataaattacttcatcttcaataagtttaaatccaattttatcagatatttctttcattagattttctataaagtagtagttatgaaatctataacttgtatccattaagtttatattgttactatgacctctcttactcctaaatacagaaacaattatttttgaaagcaaaagattaaaatctttatctgaaattattgtatctttttctcttaagtgcttttctaaaatactttctatacagtatatatcgttttcactaatgtcatctaaaaacaccttcactttacttttttcatctaattttattgcatagtcagtaattaattgccttatattaatttcttcaccatgtatatagcttccatagtaaggtttagattttataactaagtcatacttttcaagttttcttttaagcttactagacaatttatttatagcggctatacttagatttaattcttctgccattgcttctatactcatataatttctattaataagcatacatattatatttgacattcttgactcttcagagtcatctaaaaaaccatcaatatatttatttgcttctttaacagctctggctatattgtttttagaaccgcttaacttgtatcctatacctctagaagaagctattaccaaatcatatttgcttaaaacactatttaaatctgctatatatcttttaatagttttagtagacacatccaatttgatagctaattcgtttgatgtcatatatccatctttattgcttaaactctttactattattgcatgtttcttagttatcattgtatcaccttctctttgatttcaattatatatcaagtaaaattttaattgtatatataatatgtctatataagggacattttgtatttatattttattacataatgtaattattgcctctgcatatatacctattgcagttataaatctatctaagctagcaaattcattcgcactatggacattgccaaagctaccatcaggaaattcacaaccaaatattactgaattattcatttcagaagcataacttcctgcactagttactctaacatcatttttcaaatctccagaatactttatatatatatcatgcaaacttcttacaagttttgaatttctatctatataatttgcttgctttaaattttccccaataagctcaaatttattaatattattttgctccatatacaaattaaatttttttattatatcttcaatggttaatatttctggatatctaacgcttaaaactacttctaattttccatctactatatttattattgttggcactattgataaaatcccacatttcccctcaatatttaaaccaaataagtttccatttatattatcttgatttatcaacttatataaatcttttgtccatttttcatcaatattttctgacaaaagtttaattgtagctaatataggatttattgatttttcgggtttagatgaatgaccaccttttccatacacaatataattgccattatcataatttatcgatatattgttaatatcaaaacatatattatctttacccaatttttctacattctttatataaactttatctggtattgtattaaactctattccaccacttatatataaagatttatcgtctatatttgaaattaactttattattgctccacctttttctccatttaatacaggaaatttagcatctggagtaaatccacatacaccatatggctctttgctataataatgctttatacatttaaatccactctcttcatttcctccagctattaatctaacctttctttttaaattaatatctaaatcctttatcatttttagtgctaaaaaattcactatcataggtcctttattatcagatacacctctagcaactaatttatcacctataatatttagtttaaatggttcactatcccatccttcacctggatttacaacatcacaatgtccaaatatatctacatattctttaccatttccatattcaatttgaacagcatgattatctatattttttactttgaaattgttttctctacctagattttcaaaccagtttaatgcatcatatactccttttccaaaaggcatatctttagatacagtttttctatcataaaatgaaggtatactaacccattgctccaataattttaaaaattctttttcatattttttgctttctgccttaaacaactccataattatcactccaatttagaactttatattatatatcatagtttatcttatttaataactccttatactttatgtcatttcaagggacaaaacttttttactattgattttataatctatttatatataattatttgtaggataaatttaatatcataggaggaacaggattatggaaccattatttttaaaacctatttttatggatagaatatggggtggtactgcacttaaagataaatttaattatgaaatagattcgccaacaactggtgaatgttgggctataagctctcataaaaatggagattgcttaatagaaaatggaaaatataaaggtaaaaaactatctgaattgtggaataaaaatagagaattatttggaaacacacctggtgataagtttcctttacttacaaaaatattggatgcaaatgataatttatcagttcaagtccatccaaatgatgaatatgctaagaaaaatgaaaatggagagttaggtaagacagagtgttggtatgtaatagattgttctgatgatgcagaaattataataggtcataatgcaaaatctcataaagaatttgtaaatatggtaaataataatgaatgggacaaactacttagaaaggttaatataaaaaagggagactttttctatgttccaagtggtactatacatgctatatgcaaaggaacattgattttagaaactcaacaaaactcagatactacttatagagtctatgattatgatagaactgacaattcaggtaataagcgtgaacttcatgttcaaaaatcaatagatgttacgaatgttcctcatataaatttcgatactgactataaaatcgtatcaacatcagactttaaatgcacaacatttgtgtcaaacgaattttttagtgtttataaattagatgtttttggaaaatgtaattttacacacaatacacctttttctttatacagtgtgttggatggaaatggaaaacttatacacaattctgtagaatataatttaaaaaagggtatgcattttatactgccaaacgactttggagattttagttttgaaggtaatttagagattatatgttctcacatatagatataaaacctagctaaaaataggctatcataataatttaccttatgatagcctatttcttacaacttaaatatttaaacaaatagtatttttattttatttttgctcataatcatttttaatagtatatatcagaaaattctatttttattttttcttgaatattatatattctcttatcttctgtgtaatgttcactactaaatcccttcattggaagtgaaattaagaactctgtgcctttattcacttcacttactacttctatatctccaccatgaagacttactagattcttaactatagcaagccctattccacttccttcagtatttctggataaagtcttatcaacttgtgaaaattcttcaaaaatcaattctaatttatcttgtggtattccaactccagtgtcttttacacttatgattactttatctattttataatgaatacttacatatatccagcctccattatcagtaaacttaatacagtttgacaatagattcaacataattctctcaatttcaaccttgtctatataaacattaatttcttcaaggtctgtatcaaaaagaatttttatgtcttttctaagtgcatactcttctatattcataaataagtcttctattacagatacaatattgtatttcgcaagttttagtgtatagaacccagactccatctttgttaaatctataatgttatttattaatctttgaagcctataagaactttgtctaactaaatccacatgagatttaatattgttattgtaatcttttatcttttcatttctatagaaagaatctaccagttgatttgaactagatataacatttagtggagtttttaattcatgagacatatttgcaaaaaactccgttttgattttatctgttttaaatctttcaagcagttctttttctgcttgctcggaatatttcttatgtactaaatcttttataataagcattatgtatctagtattgtatatagcaaaaggtaatgcacttaattctacttctactatatcatcataactatttatcaattcatattccagtaaaagtatacttctattttcatttaaaactttagccatattatccgtaaatttcattttttcttcagtattcgcattcattaatagtttaatattagaatcttttatatcatctatgtttgtaaaagctagcatatctaaaaacgacttatttgcatagtttatacttaaatcttcttttaataagcatatgccatcaggtaatatatctataaatcttgaatatgatgattgactttcctcaagttttatttgagatatttttcgagaggttgtatcacgtattacaataatagttttattagtaccagcattagtatactgagaaaaactcatctctacatactttacttcaccatctattacatatcttttttctatactttcttcacttttacatactaatgaaaaatcaatactctctaaattatttttaaaaatttccctacatgcattattaacatatattttgttattaccttcaagcactactatgccatctccaatactttctaaaaaatctttacttctcttatttgcttcaataagtttgcgttcgtactcctttttcttagtcttatcttctagtacacacaatactccttctgtttgtgaagcaataattaaaggtgcaaatatagcttgataaactttattatcgcttgtactaataagtttctctgcattcttctcatgaacaaacacataatgaatgctttctatcaaatcattgaagttttttattttatcagtcaatttatcttgttctttatagtctccaaaagtatttctaaagctcttatttgcatatgtaatttctccatctttgctaaacactactatgctatttactgctacatctaatgtagattgtagcctagattctcttttcataagtattcccttaagttcctctatcttttctgtctcatagattaattttttattcttttcttttaaactttccgttttttttgttaattcttcattcgtatcatgcaattccagtgctgttttcttaatattcttagatactatgtaattatataaataatataaggctacatttattattatctgtgataatatccgctctacatttctattatcaataactatatgcaatagatttggaactcttgataaaattattattactattattctgttaaaaatctttttttcatcatattcccatttacctttatttgaacttgaatttaattcaattccactaatgatagaaataattattatgaatatagatattataactcctaaagcatattgtgatttaccatttcccagatagtcacaaattcctgatattatgaataaagatgttattgttaatgtagcagttgctataaataaaattatacttgaataaatttgtttgttatccttaacaaatttaaaacttaagtatacacccagtataggaaataaatctgttattgctgatattgtgatgttaatctccattatagacttagttttaatccccaaggaattaaataaatatatacactccaatactccagtagctataaaaattaatcctaaaaatgtagaaaatgaatctactttaaattttgtagtattaaatataattactcctgtagctactaaaaatatcgtatatatggcatgtaataaagtttcatatttctctatatcttttataataaataataaaagtactgagcccattattataaataaaaggctcatgtcttctctttcttttatatctggttttacatcaggtattatattcttcaatactttacacttcctcttaattaatattttatactaattaattatacgatactcgacattataattccttctttataccttaaagcaaaaacagacattttctgctaaaacaaaattcttttgttttctactcttttagttattttgtttctatcgaagttttccaatataatcatgcaattctttctgctagaatcaatcaaatctctgtattctcctaatgttatttctttattttcttttatataatttatcaaaatgttctttgcattttcataaatatctttgtccattatatacaaatcatctaatttctctactttattacctatcattgactccaatacttcagcatagttatgatttccttcagaaacttcatctattgtcagtatagaagaaactccacatgattttaatcttttttctattttttttgctatttctttttgcttatcatttaaaataacctcaaaatctaatagagatactatattattttctatttttatagcattttctgtagacaatttttctaataaaatatccatctccctagtcttaaaattactctctatcttagaccttacttcttcttttagtatcccttttctaagcctatacttcttatggtactcacttaaaagctttattgtattttcttttaatttattgtattgatttatatgcatatacatatttcctataataaatactttatcttctgatataagtgcttcaagcgctctttttacatcttcttcatgagcaccactatagctcattatttcttttatatttggataattttttaaattcctttttaagtactcttctattatatcttttagttcgcctttttcttttatttttaatgcttctataactttttcatcaaatttcttatgttttttaggagatgggtcaattattacacctccacctatagtttccattggagaataacgtctcactacaaacgtatcacctttcttagatactatgctttcttcaagtctcaactgaacatagccactttctccactttcaattaattctttatctagtggaactgctctacaaagtatctctctagttccatgatacaatcttaatctatcccagtgctttaatcctttatctaaatgatttaccaatgataattttacatctaacatcattgattcctctaatgagtttggtgcagctaaaacatctcctctttttatatcatccacttttacatttgatatattgattgctgttctttgacctgcataagctgtatctttattttctccatgaacttgtatacttcttatttttgtttttaatacctgtggatatataactaaatcatcttctatacttatctttccttctattaaagtgcctgttattacagtaccaaacccttttattgaaaatactctgtctatattaagtcttgctggagagttttcatttttatcttctatatcatcactcattttatctattttttcaataagagtgtctatacctcttttagatatagaatcaacttcaattatttcagcatcttcaagaaaagttccttttattttttcacaaatatcttcttttactagctctctaaattcatcatctacagtatcagacttagttagaaccactattccatttttgatatttaaaaagcttagaatatctaaatgctcaactgtctgtggcataaccccttcatctgctgctacaacaagtaaaactatatcaattcctgatgctccagctaacatgttttttatgaatttttcgtgtcctgggacatcaacaattccagctcttctattgtttggtaaatcaaaataagtaaatcctaagtttattgaaatacctctctttttttcttcatctaatgtatcagtctctcttccagtcaatgcttttataagagtagtttttccgtggtcaatatgacctgctgttccaattactacatttttcattttttgccccctctaaacctgctatgactaaagtcacaagtgtgtgtagctattttttaatcaaaacttcatacttatacttctaaatttaatatttattagctcaaatttatttaattaaatgcttttctcaattccgcaactattacatcaaattcatcatcaaatatagttcttacatctagtacatatttattatcatacactctggctattatatgtgcttcactaagtcttagttttttttctaaagatgaaacattcatatgttcaggagttattgatattacctttgtacttatagtttcaagaggcatagaccctcctcccacttgtgaaaatccatcttctatatttatgtttgcatttaagtttaaagcagttattttttcaaatagtttatttgcttttacttctaattcttcaattttatatgtcaacatttttaaagtaggtatattttctatagcttttgtctcatctaaatacattctcaatgttgcttcaagagcacatattgtaagcttatcaactctaagtgctctagtaagttgatttttcttcattttttctatatactcttttttcccaactataatacctgcttgtggacctccaagcatcttatctccactaaaagttactacatctgcaccttgtcgaatagaatccaatacagttggttcataagataaaccgtattttgataaatctataaaaactccacttcctaagtcttctattacaggtagtttatattttttacctaaattaaccaattcttctatagaaacactctctgtgaatcccattattctataattacttgtatgaaccttcatcaatacatttgtatcttctgtaatggcctccttgtaatctttcaaatgagttttattagttgaaccaacttcaactaattctgcaccactaagagccattatacttggaatcctaaatgaaccacctacttcaactaattctccacgagatacaattgcttctcctcctttagccattgtgctaagtacaagaagtactgccgctgcattattatttacaactagtacatcttctgctccagtaagtctttttattgtactagttaaatgagagtatcttgaacctctttctccattatccaaatcgtattctaagtttgaataccttgaagcagcacaccataattcatcttttatatcttcactaagtaaagacctccctaaatttgtatgaataactgtaccagttgcatttataactttttttaaagataatgagtaatttaacttaactctctctattgcagattctattatttcaccaaactctattgttacagagtttgatgcatcttcttttaatcttaatataaattgtctttttaaatctattacttctctcacagattctaaaactaaacttctaggatattcatttattatttctacaattctattatcacttaatacttcatcaactgaaggcaacattgcaaacaattctcttttgctcaaaacaatcactctttctctataatattttataaaactgtaatatatttttccccttttggaactacagaacctataattttagcttctattgctccatttaatttcatatcttttacaagttcctctgcaagttcttcttttactgaaattaacaaccctcctgatgtttgtgggtcgtataaaatatcttgaactgcaacttctatatttcctacaacttctacatctttagatacataatgcatatttttatacataccagcaggtataattcccatttgtgccatttctattgcaccttcaataattggtacatgttttgattcaatttcaatacttacttcagaagctttggccatttctaaagtatgaccaagtagaccaaaaccagttatatctgtaaccgaatttacatcaaatttctcaaaactcattgctgcatatttatttaaatgtatcattatttctattactttatctgctatatgttgttctaccataccttctttcatggctgtatttaatacacccactccaattggttttgttataattaacttatcaccaggttttgcagtagcatttgataaaactttatttggacttacaatcccagaaactgaaagaccatatttaggctctttgtcatctacagtatgccctccaaccaaaagtgctccactttctttcactttatcaaacccaccttttaatatttccgcaagtacatccatatcatggcatgatggaaaacaaacaatattcatagcaaccaaaggtttgcctcccatagcatatacatctgatagtgaatttgatgcagcaatttgaccaaatacgtatgggttatctaccattggtgtaaagaagtctaaagtttggataagtgccatatcatcatttaatttataaactgcagcatcatctgctgtatctagtcctactaataaattttctatattatcatttttaggcaattgagataaaactgatgccagaacctctggccctattttagcggctcaaccacctgctgttgtcatctctgtaagttttttttgttcttttttcataaaagtgcctcctttactaaatttccacatgtacacacatatacatacatatttataataacatatctatatgtaagttttgtattatattttagtctacacaaattaaatcttttatattttcatactttttatctccaataccatttacattttttatttcctcaattgaactaaactgtccattttcttctctgtgttgtaaaattttattggctgtagcttctccaaccccaggtagagaatctaactcttctatagtcgctacatttatatttacttttgattcgttagatatatttttattggatttatttttaggctcacctcttgactcattcttctgatttggtttattggaatcatcattacttgtaacagatgttgcttcacctattttaggtattatgtaatgttgttcatcttctaatcttactgatagattgactccatttaaatctgcttcttttgtcgttcctcctagtaattctacagcatcataaagtctcttgtctgactctatagttacaattccaggtctatttactgctccacttatgtatatagttattttattattttgaaaatttttatctatgtctttagttactttattgtgattattatcttcacctttaatttcattctctacaacatgtgttttttcattaggtaaattttttttacttacaacataaatatcatctttgaaaataagcgatttataaacgattattgatgatattattaaaataaataaaacaaaaaacgaaataaattttaccttttttttcatatattaatcactcctttcttttaattattgacaaatatatgctatactaaaagatgaatttaaaatttggaggctcacaatgaaaagaaatttatcacttttattaatctgtttattgatatttacttcatttttaggaagctctaatatctcttttgcagataatgaaccagctatagttgctaaacatgcagttttaatggactatgagtctggcaaaatactatataataaggatggaaattctaagctttatccagcttcaacaactaaagtatggacagcttgtttagttctaaaggaggttaaagatttaaatcaagtaatagaaattaaagatttacctcaaatagatggctctagtatgtatctaaaaaatggggaatcttttactgtaaagcagttactagatgctcttttggttcattctgctaatgatgctgcttttgtattggctagatatgttggtggtggcaatgtacaaaaatttattgacctcatgaactctgaggcaaaaaaaattggagctactaatactcattttaataatcctcatggattaccagacccaaatcactacacaacagctcatgatatggctctcatagctagagaagctatgaataatgatacttttagacaaattgtaaaaactaagtcacttaaatttgaagctacaaaagcatatccttatgagagatactttgtaaacactaataagtttttgacatcacatgataagattacatacaaaggtcaacctataaatataaaatatgatatagttgatggtataaaaactggatatactgatgctgctggtaaatgtcttttatcgagtgctgtaaaagatggcagaagagttatcgttgctgtatttaattcaactaatgctgatttatatttagactcacgtattctgattgattatggatttgataactttaagtgtgctactattgttgataaagaaaaatacacagatactaaaaaagtattgtttacaaaacaacatgaattgatttatgaaccaaaaaatagttataggatattcttagaaaaagatgaatctcaaggcaattatgataccaaaacagagttaaataaaattgatttgcctataaaaaaaggagctaaggttggtactttaaatgtatataataatggtaaactagaaaacagtatagacttaattgcaaaaaataatcttgatagcagtcttccattttttactggaaataatattttaatgacttttgttaagattattgcaggtattctagtgcttttagttttatttataatagcttcaaatataaagaagaaaaaaagaaaaaaagctagaagtaaaaaaaatatgaaaaagtaacaagtagttggaaattataataaaaaatttataatatacttatccttataaatctaaaagtactgagataataattataactattatctcagtacttttaattttatgtttatgtattttttatacctatatatttttttgtttttgtttgtctttaagcttacattttgaacaatttcccagacattcatcaaccatatctagacattcattaaatgctaccttactactatttttatgccttacgattaatatatcttgttttttagcttgagactcaaccgttctagacatcttatgtgaaacagttgatgtaagtatgacaactgcatctggtcttcctatagaattatttaatttagatgacatggtagtatatacctttgtcttataaccttttttcttggccataaccatataatctttttccattctttcatgaccaccaatcactaataagttcattagatttcctcccatttatttgatattgattttcattattatttatattatatataatagtatttagaaataattttgtcaatacttattgatattaattatcattttaataataattttttatttgtatttattttaaatactactccttttaagtttcttacttttatataataaaatcttacacaataaaaagctgtaaatttaaatgataacattcaaatttacagcttttaaaaataaatacattattttaaattcttttttattcccttatttaatatactctcatagtcgataaaatcataaatatcttccttaaaagcatctgaaaacttatgtaattcttctaatgttaaatcttctattgcttttttattatcttcacaatatataacgatacttcctactataccatgtgcatctctaaaagcaacattatttttaaccaaataatccgcaacttctgttgcatttaaaaaaccattttttactgcttgtttcattttatcctcatttacctttagtgtggctatcattctatccattatttgtatacacatttcaagagtatgtacactatcgaaaaaaccttctttatcttcttgcatgtctttattatatgctaatggtattcctttcattactgtaaaaagaccaaataagtttccatatactctgccagtcttacctcttataagctctgcaccatctggatttttcttctgaggcattatactacttccagttgtatataaatcatctatctcaacaaatccaaattcttgagaactccaaagtatcaactcttcacttaatctacttaagtgcatcattataattgaaaaatcactcattagctctagtaaataatctctatcacttactccatccataaaattatctactacttttttaaatcctaattgttcacaagttatacttctatctatatcatgcgtagttcctgctaaagctccacagcctaaaggtgattcatctaatatttctatagcattttttattcttttctcatctctatcaaacatactataatatgccattaagtgatgcttaaatgtcactacttgagctctttgaagatgagtatagcctggcatcatcactgggtttttgtcagcaacatcttttatagtagctttaaattcagatattaaacccaccaaatcatttgctttttctttagcatacaatctcatatcaactgcaacttggtcatttctactacgtgctgtatgaagcttcttgccaacatctccaattctttgaattaaatttatctcagtaaaactatgtatatcttcatactctccatccaatactaactttccattttctacatcttcaagtatcccttttaaaccttctgttatagactttccttcttcttctgttaaaagtccacattttacttgcatatgaacatgtgctacacttccttcgatatcttttttgtacagtacacaatcatagccaaaagatttattaaattcttccataagttgattttccgcttttctaaagcgtccgccccataatttcataactttcacctcatattttaattttttgtattttaattataagtcttgtaactcaatgaaactaaaaaatctcttggtcaaaaagaccaagagacgaaatattccgtgttaccactctagttggtaaacaatgtttacccactctattctcttaaggcgagattacctactaccatactgaatttcaagtagtattctccaaagttcttttcaatataaagtgttatcattaggctcacaccatcccccaattcgctgagattttctctatatctactctctttttcactgaatctaaatttttatgttttatctatttgtattataattactatctacaaaatagtcaacctattttttcctattatatactgttttaagagctaagtgattcttttaactctaggaatttataaattgcctttgcaactccactgtcttgatttgtatctgtaacataatcagcttcttgtttaatcaattcttctgcatttcccatagctaccccaagaccagcaaactttatcatttctatgtcattgtaattgtctccaaatgcaattatatcttctctgtctatattcattttttcagctaaaattttaactgcattacctttatcaacaccttcattcatgacttcaatattgtttggccatgaagaagttatctttattccttgaacttttctcaattcttttcttatttcatccaaaatagatggatttttttcttctatgattacaaattttagtatatcttttttaaagatttcttctctcaaatcatcttttacaattacttctgtttcagagcctaaaaatacacttaatctatcttcacgtccttctatttttttcgaaagcatagaatctatactattacattggtagtaaatatcgtatttatctaatacatctaaaatgtttaaacatgttcttgtatcaatcttatttgaatatattatatttccattttgctctcttattaatgaaccattacaagctattattggcatgtcctctttaagaaaatctacattgcatttagctgaatcgaaggctcttcctgttgctaaagttacattaataccgctttttataactttttgtagtgcagttttattttcatctgtaactttatgattattgcctaataaagttccatccatatctgttacaattaatttatatcccataatccaactccataactttttattgtatacctatatttccttaatataatctaaagaattacccttattagattatatcataactttatacttaaactatttcaatttacaaaattaataacattcatttaacttattttaagagcaaaataaatcgtttcttgtagtatttttctgaatattttcaatttatagtcttataatgctagaaattttacaatatatgatatataatcatattaaataaagtgagctattataatatttatattcattttttactattatatattttcataatattttaaatctagcaacttttataacatttattattgactaaataaggagtgataaagtatgaaactaaaaattaacaaagctattgaaatgcagttgaaaaaaagttatgcaatagaatctggacattcagaagatgtattcgagatagactgtggtgaaggtataaataccgtgtcttactcaagcaaagctgtagaagcttttaatgctttaaaatttgatatgataagaggatatcctcattcaattgctttaaaagataatatagtcgattattggaaagattttatagcattagatactgacagaatttgtttggcagatggttctatacatgttatttaccttttaaatagactatttattgaaaagggagataaagttttaggatattcacctcagttctcagaatatgagacagatataaaaatgcatggtgcaacttatgattatgttcttttaaagaaagaggataatttcaagtttaatgaaaaagaatttattgaaaaaataaatccagaatataaagtaatttacatagacaatccaaacaatcctacaggacaaattatacctttatcatcaattgaaaatatagtaaaggaagcagctaaatatgatatagcagttatggtagatgaagcttatggtgaatacatgccaaaagaaaattcagctgtcaagcttctaaataattatgataatgtaattgctttaaaaacattttcaaaaggatttggtttagcaggactaagagcaggatatgcagttcttccagaacaacttgttagccctattaaaaagatttctactccttacgaagtgtctgaaatatctcgtagtattgcagcaaatttattagatgatgttcaatttatagaagaattaaaagaaaaaacaaaagatataaaaaatcaattactaattccatggaaaaaccttaatatagctgaaactagtgatactgtatcaattatgacagttgaacataaaaacaaggacatagatttacaacaagagtttgctaaattaaaaataagagttatatctggaagtgattttactggacttgataaaaatttcataagatttagaatgcctgaagaaaaagaattacctgaagttataaaagcattccaaataatcgataatatagaataaattagactatttataaaaggcatattgttaaaatcaatatgccctttaattttttgattattttacttcacttctatttattaatttgttaagttccattaatattgatgaaattaatgctaaccctaggcaaatccccaactggtacaatccaaacgttgttggtatagagaatattcctcttagcactggtattagtgttaaagagtaaagcccaagacagactaaaactgctcctataacgtatttattgctgaaaaaacctaattttattactgtttgattattagaacgtgcaggtaatgtttgcattattctagctaatatcaatgttgaaaatgccattgctactccaagttctggagatacttgtaatcctatatattgtgcaattattgtaactacacctattatacaacctcttatagcaactgccttcaatgttcctcctgctagtatactttcatccgggtgtctaggaggtttattcattatatttttttctgacttttcaaaccctaatgcaattgctggtaaagagtcatttactaagtttataaacaaaagttgtaaagctgtaaatggatttgaccaacctgcaaacactgcaaatactatggatactatagctcctaagtttcctgcaaatagataagtaattgattttattatattactgtatactgttctaccaacttcaacagcatttactatacttgcaaagttatcatcaaccaataccatagcagaagcatcttttgctacatcagtaccacttcccataccaattcctatatctgcttgttttaatgcaggtgcatcattaacaccatcaccagtcattgctgttatattattcttatgttgccatgcttttactatacgaattttattttctggcgagactctggcatatacacttatattttctagtttttcatatagttgttcttcactcaaagcatcaagctcttttccagtaagagccaagtctccttcttccattataccaatctcttttgcaattgctgctgctgttgttttatggtcaccagttatcataacagtttttataccagcactctttgcctcttttactgcatccattacttcttctcttggtgggtctatcattgccattattccaaccaatgtcatgtcatgttcgtcatcaattgaaggtataaaatcttcttctgggacatcttttattgcaaaagctaatactctaagtgctctatttgaaaactcttcatttttatgtttatattcttctattatctcatctgttatatctacttttgaaccatttttcaaagcatatttacatctactaaacacaatatctggagcaccttttgtaaacattatataatctccatatatactatttacagtagacataagctttctgtctgaatcaaatggtatttcatttattctgatatacttacttcttaatttatcataatctaaatcatttttacttgaataatttattaaagccacttctgttgggtcaccaacttctttaccatcactagttatatgagagtcattacacaatgtagaaaccatagtcaataatttagcatgataagaatagtttactttttctttatctaactcatcattattagttccatacatataataatcaactactgtcattttattttgtgtaagagtacctgttttatcagtacatattacacttgttgaacctaaagtttctactgctggtaattttcttattatggcttgtttttttgccatactatttgttccaacagccaatactatagtgactattgatgatagagcttctggtatagctgctactgctactgctacagagaacatgaatgaatctaaaataatttgtgtcatttctccatttccagccataaagtaatttcttgctacttgaattataaatattaaaagagcaagtattacaatacctacaccaagttttttactaaaatcctctattttttgttgcaatggtgtaagtttattttcagcactttctaaaagcccagctattttacccatctcagtatccatacctgttccagtcactacaaaagaacctctaccataaacaactacagcaccactaaataccatatttttctggtcacctaaacttacatcttcacttattttttctgtatgctttaaaactggttctgattctccagttaacatcccttctacaaccttgagagattgtgcttctataagccttccatctgctggtatgtaatcgccagcttctaagaatacaatatctccaactactagattttttgctggaattgtcatttttttattgtctcttattacctttgcgtttggtgcagataaatttttcaaactttctaatgaactttctgctttttttgtttgtacaacacccagaacagagtttataataataactgcaaaaattattatagactccactgtttcacctaaaaatatttgtactaaagcagctatcaatagaattattactaatgggtctttaaaactttctaggaaaagcttataagtaggaaccttatctgcttcttttaattcattagctccatttttttccaacaactcttctgctctttctttactcaaaccagataaacttgagtctaaatttttaattacttcttgataagtacttttgtaagacatttgttgccctcctcttcaataaatttattttatgtttgggggctcttatgtatacttgaaatttaaatttttttaaataaaaattccttgaataaaaaaagaccccaaaacaaacatacctaatgcttattttgaaggtcttgctatcaaggaatcccttgctaattaaccgagtatttctactgtcttgacgattaattaccactttcgtgtaagctactccccttcgagtagttatcttaaattgtatttacattatatcactttacacagctaatagtctaggttattttttattttaacctaattttaacaaaccatctcttaatttatatgtaaatattcttctaaagtcaaattattcattgcaaagtttttgctatgttcagttccaacatatctatagtgccaagattcatacatatatcctgttatattctctttaccttctggatatctaagtataaaaccatatttatatgcattttcatacaaccacttagcttcttttgtattgttgaactttttatttgcccaacaagactggtcatctcctccaatatcaaaagcaagtccagtttgatgctcactctctccaggtttagctgaaaatctatttgcttctttttctccatgttcttttacatatgatttaaataatctatcttgatattcataacttctatatgtactaaaagcttttaaatttaatcctgacttttgagcatctttattcattttataaaaagcatctctcgcttcactgctttcctgaggagaataatctttgggcaaactatattttttattcgctactataatattgtttattgataatacatttacgcctttcctgtatttacttaattcagctgtcataattttacttccttcgctagagctatcaataaacatttctacaaaaactataaatagagcaaaaattattgctacacaaattttctttttcatatactacacctccataattggaatttgatacagaaaaatttcaagacattctctttcatactataatcataccactaatttattgcaacttctttaaacaattcttaagaaactcttaagtttcttttttatacgactaaaaataacaacaaatttttcaaaaatttcatattacagtctatatattgattttttttccaaatgatgtataatatatttattaaaacttgtaggtactatatagtactaaacgtttttgcgtgaaaggagataataaagtgacagaaaaacaaaggctcattataaatattgcacaaaaaatttttgaccaaaaaggttttcaaaatacttcaatatcggatgttgtaaaagagtgtaaaatgtctaaagctactttttacaagcattttgaaactaaggaaagttttatctgcgaaataatcaattattatgatgaaaagtttttagaaattatacattccataaacgaaaataatgacattccatcatcagaaaagttaaacagaaagataattgctgtatggaaaaatattttttctagaactaccataaatacctatataagagaaaatttttctgaagagcaacgtaaggctacaagtaaattgcaaacaaaatcacgagctaacttattgaatgaatacaaattaagcttatttgataactatggtgataaaatagaaaaaattatatttgatttagttttcttattggatgctctaattcatcagtttatatacattattcatgtacaaaaaagagaaataaatgtatactttattgccaaatttactatacaaattctagatttagttgtagaaaatatggataatctaaatcctttaattgaaaaatcaatgtttttacataaacaagaagatgaagtttacttttcccttcataataaatcgctattttttaaaacgatacaagatatagaagaactaatcaaaactgatacttctctccttgaaaatcctaaattactagaagcaataaaaaaattatacgtcgagggaaaaaatcaacaatatgattctttaattatggatgcaatgattgcatatttagaaaaagaagacactttaagaccaaaagtacttttattgaacagcattaaaaatcaattaaaaaaggagacgttataaattatggaaacccaaagtaacaataaaaaaggaaatttaataatagcaattgtaatgactggtgcttttataagttctctcagtcaaacactattgtcaacagcattacctaatataatgtcagattttaaaattactgctgatattggtcagtggttaacaacaatttatctacttattgcaggtattattgtacccacaacagcttatttaataaatcgatttagtactagaaagttatttattacatcaatgtctatcttttctataggatgtattattgcacttttttctaataatttttcaactatgttgattgctcgtgtgttgcaggcaatgggttctggttctctaatgccacttttacaagttattatactctatttatgccctgaggaaaaacgtggtgcagctatgagtttagttggtattacagtaggatttgctccagcaataggtccaactttatcaggatggttagtagattcatttggttggcatagtttatttctgtttctttcccctattgctatattagatgttatactatcatttattctattaagaaatgttggggaaactcaaaaactaaagttagatataccttcaatagtactatcatctctaggttttggtggtttattaattggatttactaatcaaggtaattatgggtggactaatattgccacatatttaccaatattaataggaattatgtcattaattttatttacattgcgtcaattaaaatctaaagaaccttttttagaattgagggtttttaaaaataaaccatttcttatttctacaatattaattatgattgtatatgcctcaatgatgtctgctacattaatgattcctctgtacgttcaatctgtaagaggattttctgcattatcttcaggttcattaatgttacctggtgctatattgatggttgtactcaatccaattgcaggacgtcatttagataaatatggacctcatgctctatcaatattaggaacaggatgtttgtttttaggaactttatccttcgcttttttaggcagagatacatctttaattcatgtgtcattgatgtattgtattcgtatgattggtatttcaatggttttaatgccattaactacatggggaattaaaacattagatagagaacttatatctcatgccacagcaattaataacacactccgtcagatatctggagctataggttctgctatacttattactataatgacaagtgctactaagaaagctcatatgagttcaaacatgctgtctaacattcatggaatagatgttgcattttcaatagcagctactcttgcatttactggtttaattgtatctatatgttttataaaaagacatcaaattattagaagttaatacagaaaaggagttatcctatgaacaatttaagtttgctctatgataactcctttttattcattttaaccagtacagttttaattattctatatatttcctatatagttacctcttaaacactcattcgtttttatcaatataattgtttctagccttacatacattttttgtcattatttttctgataagatgtacatatatgaaattttttaattttgacatatgttgtgaatgagtagaaaaaaatacatctggtgatggaaaaataccataatcatacacgatagcttctttttggataaaagtatctttaccatcccaatcaatagatgtatttttcaaatcatttgtagctattgcatactttttaaacgttccaccatgattaaaaaacttcttctgaattgcttctaaatattttttatcagttatgacaccctccagagcaatccacctatcttgataaaatacctctacccaagtatgaagaatatattttggtgctaatagtgaaatcaatttggatgtagcacctcgttgaaaatcttttgttacatcaaaagcatgaagcctacaagggatattcactgcacgtaataatgccattaaaagagtagcttttgtattgcattgtcccataccatcatttaatacctgtgttgcgcttaacatatcagaagcattatatccaaataaaatatcattctgtacaaactcataaatagattttattttatgaaaatcatctaattccaaccaattctttgatgataccaaaagcttaagttgtggttcattataatttaacatttttgtttcctctaaatattctttattcataacaaagcccctttcttagtacaacttcattatataacgagaatatttaatatactttcaaaaattcgctatctttcaaagataaagaaacaggcattcccatcattcgcttaactgtccctgcaaagtgtgatggagtatcgaatccagcagtcatagaagcttcggtaacatttttcccagaaagtaattctctaaaagcacactccatttgatgaaataagatatagctttttaaaggtatccctatttgttctttaaacagatgtgataatctacttgctgatagggacactttatctgcaaaacttgaaatagtatgattatcacaattacaagtacgtaataaattgagcaattcagtaattctgtcatcataatgtttgagagttataggtatattcaaatagttattaagcatttccataaatcttaaatattgttctttactagagttatatatcaaaaaagttccttgttgacgtaatttctctaatccatcattgtcacatatccagtagccaaaatcattcatttttgaggtaagctgttctgcatatatagatgtaggttcaataatagcagagtaataaactttttttcttgctgaaaatgaatgagagatatttttatctactatgatacaattacatttaactaatttttcattgactgttatttcaatgctgtcttctatccctaagaacagttgtaacatgcagtggctatgtgtatctgcctctaaattatttgtaatcatgccaatcctatcttcttgccaaaaaattttatttataatgttcattgcatcaccccattcttctaaaaatatcactctttattttaatatattgccatatgtttgtgaatacattttgataaaagactctgaaaacatatctaattattaaataaaaaccctttcttttatcctactatcttaattctggccagtattccttattaacttctatcatttcatccaaaatttctttagcaacattcatacttggaatagttttatttaatgtgaatgcttgtaaagctttttcataactattttctatataagcttctactatcaatttttcactgttaagttgttgcatcattaatccttgttggaatagaggtattggacctcgagcaataacttctggaccatctttaccaatatatgctggaatttctaccattgcatcatatggcatgtttggtatagctccacgattttcagttataactaaaaaacgactacgtgtatcatttttaattgaaactgccaaatcactaatccaatctccatgtgaacctgcataaaatactttttcagaaatttctccagtttctaagtaatgtctcacaccttcaaataagtctttttcacggctttccataacctcatttgcacgagtacgatttatgtttgaatgttccactgtttctttacttaaaagatagtatgttaaataagtgtttggcagatattttgggaagctttctaacattgtataaacagattcccaaacatgtatccagctacttacagcatggcgatttcctgtactacgacttttatttaagttttctatataagattttggtaataatattttattttcttttatgtattccttaatctcttccattaagtctctatgtttataatctattgaagtaaaccagccaaaatgatttagaccaaaataatcatagcgtatattatgaacgtcattgatatttaatgactccgctatcatatctataatagctattggcatatcacagatatttataatccttgcatttggtcttaacttacgacaagcttcagaaacgattgcagcaggattagagtaatttaatatccaataatcttttttagcatatttctctacatcatcaataacctttatcattggttgtattgtacgcagtccgtatgccatccctccacaaccacaagtttcttgacctacacaaccatatttcaatggaattttttcatcctgctcacgcatttcatatttaccaacacgcatttgtgcaaatataaatgtagcatctgtatacgcttctttttcacaattagttacagttagtttaacatctgttttaacatcttcttttagtatccagttgacaactacagctactttatcttggcgttctttatcaatgtcaaataagcgaatttcctcaagctctaactctttttctcttaacgcaattgacttaacaatacctggagtaaatgtgcttcctccaccaacaatagtaataatcataataattattcctcctctataaattatatgtatctttaataaatagtaaacagcacttaaagctgttatttacccttgctatataaatatatatctttaataagcttctaaaaaatcttctactgcacgtcttacctcatgcacatgaagtccaaaaattatttgtatatcttttcctttccttacaatcccgctatttggcgttaaattaattatatcttcattaatcttactttcatcttttacattaacacgtaatctagtgatgcaattttctactgtattaatattttcttttccgcctaacccatcaattatattttctatacctgcatctaaattaagttgttttgattgttcttcgcctgtagctgtactctcatcttcacgacctggagttttataattaaatttcttaattaaaaaactaaatactacaaaatatacaataatttgtgcaagtcctaatatcatcattactggccagtgtgttttttctacacctactgtagtattcattataattgatactaataagttccctccacataatgcagtaacatcaaatatttttaataaagctataaaaagaccagctataactgcatgtacaaagaataaaagtggtgcacagaatacaaacataaagtctaatggttctgttacagaggctaatactgccgtaattattagtggaataatcgttgccttaactttcttcttattttgcttatatgcagtataaataaaggcagctcctatacctatataaccaaacatctttgtaaatccagttgccatgtagtatatactatctgagaaacgctcaactggtaaattcatttctgtcataactatagcataggctcctgaaactgtatctgcaccaactttaagcactcctcctaaatcagaaaactgaaatggtgtatagattaaatgatgaagtccagttggtactaatattctctctaaaaaaccatataagaataaaccaaatgtacctgtatctttgatgacatttgcaagagaagctattccttgttgagctaatggccatataaagttactcacaactccaattaaaatggatacaaagaacatgcatataaaactaaaatttgctcccgagtatatctgtaaagctcctttaaatgttttgttgcttgtacgattaaatacatatccagctatacaccctaaaataattccaccaaatacacttgtatctacaacttgaatacctaaaatagtagcttgtccagtccctatcagtccaagcatcttgctttcttttgctagttgacctagtgatgttaacatagtgttggaagctgtaaggtatattatataactcataaatcctattaacgctgctttgtgcttctctttttttgctagtgcagcaggaatacctatagcaaatataacagcaagattattaataatagccattatacagttataaattaggcttccaaatatttgaattggctcccatttaaaaaatggaagtactcctaataacatatcatttgtaagtagtacacctaccaccattaatattcctgcactcgataaatacattaatggctgaaccattgcctttgcaaatgtttccagtcctccaagtagtttttctttcaatcttatccccccctaaaattatatatttctattactaattcatctcattcttataagatttttgttaggtgtagtagtagataaattttttcaggtttatctaatttatacctaaactccttttcaatatatacatttaacttttctaaatattctttatttttaggatgattgttaattaaataatcatacatttcaatcattttatcatcctgacaaatttcattcttaaaaattctttgagcaagaaatttaagatgagttctaaaacgtaatgtacttaaactcgattcgtctaattctaatccataacattctttaatcaaatcaatactaccttttacaaattttaaagtatcatatgccaaattatcatttgattgtaaattgacaaaatgtaaagctatgtaacctgcttcatcttcaggcaaatggatatgacatactctatatataatttctaaagcttttactcctaattcaaactcttttgaatacatcatctttatatccaaaagcattaaattaggtaaaaaaacattatttttcattctatctattgcaaaactaatatgttccactaaagataatatccctttattattaaattttccctcatttcctggtataagacttataatttgttgtgaagcatccatcacttctggactaacattttttaataattctaaaaattttgtttgcatgtggtcttgaacataataaatcttttctattttatcttcattaactttatctcctggacgtttattaaaacctataccaagacctagtaaaatagcttctttcctatcattagttactgtagataatgcattattattaaagatttttactactctcatattgaattaatcccttcctattatttcataatttcaataacagtatcttgccctgcaacaacttcattttctaccatgcaatttatttctgaaaattcgctatgatttaatacaattattattgttgtacaatcaattccctgagaatttattttttctctttcaaaacttattattggactaccttttttaacagtatctccttgagacacttcatttttaaacccctcaccctgtaaattaactgtatcaattcctatgtggactaatatttcaacaccctcatctgagaccataccaaaggcatgctttgattctgtaagcacagttactttaccattacaaggggctacaacaacattactattaggaataattgcaactccatctcccattaacttttttgaaaacacagaatcgtttactttctcaatattaatgctgttaccactcactactgcatgtaacttatagcttttatttttcttgaaaaaatttaacacaatacttcctccttattaaatagatttttgaatttcaatacaaaaaaggcatgaatcctcaggataaaaatatccaagaactcatgcctaatttaatagttacacgtttcaaattatatactcattataaaaccttctcaaaaatattgcaatatttattttaattttattttttaattcgacaatatttatcatgttctttattgtgatttatttttttataaaaagactgaatcactagaatatagtttttcagccttttcaaattaaaaatattgtatttttataatacagctattacttctatttcaactttaacgtcttttggtaatctagcaacttctacacaagctcttgctggtttattttctccaaaatattcagcataaacttcgtttatagccccaaattcattcatatcttttataaatactgtagtcttaactacatttgaaaaatcagctccactttcagctaatatagctttaagattttttaaagattgagcagtttgagcttgtacatctccttcaactacttccatagtctctggtacaagaggaacttgtccagatacaaataataagtttccagcttttatagcttgagaatatggtcctaaagctgctggtgcatcattagtatgtattacttcatgtttcattttaaaatcctcctaattcgttaatctaatacacataaaatgtatcttcatacactattatactatttttcttgtatattatatacactttttattataattctataattttaaaacctttttcttctatagctttctttattctagctatatggtcataatctattgtctctaatataaattccgcactttgttttcctagagcttcccctgctgataatttaccttgattagcacttaaaatgtttccaccattctcacttattattctagttaactcagcaaagtttcctggcttatcttccataattgtactaaatgaatatcttcttccttctttagctaaagcaacacctattattctatataacgtatttatgtctatattaccaccagatattatacaaactacattttcatcttttgctggtacatacttaccacttaatatagcagctgtacatacagcaccagcaccttctgaaactattttttgactttccatcataaataatattgattctgcaatttctgtctcttcaaccactactatttcatcaaccaattcatttattatttcaaaagttaaatctcctggagttttaacagctataccatcagctattgtagtatcattaaatgctgttgttacttttccattttttattgactctttcattgaaggtatatttgcagtttgaacaccgactatttttacattaggatttaatgcttttgctgcaacagcaacaccagagatgattcctcctccaccaactgggcatagtatagtatcaactttattgtctaattgttcgaaaatttcaagagatatagttccttgtcctgctataacatacttatcattgaatggatgtaagaaagttgctcctgtttctttttgtatttcaacagcttttgcatatgcatcatcataaaccgcaccatttaaaactacttctgctccataacctttagttgcactaacttttgctaaaggcgcagttgctggcattactattgtagattttataccagtcatttttgctcccaatgcaactccttgagcatgattccctgcacttgaagctataactccatttgccttttcttcatctgttaaactcgctattttgttacaagctcctcttaatttaaaagaacctgttttttgaagattctcacatttatagaacacatttgctcctgttttttcgctaagtttaacactttcaagtaagtcagttctttttactatgttcttaatggtctctctagcctctttcacatctgttaaggtaacattcatcatttcattccactcccgtaaatccaatttttgtttattactttctatataattctatatcttttttttttaaaaatcaacatgtaaacgatttttataattttttaattaatcacaaaaaacctaaaaatacaacaattgcatacaataaacatatatcttcaattcatttaaattacattaaatgataatttaaaaatattttttacattcttattaaagcaataatatatactttattatttttattaaaatttatattttatattattttatttacccaaaatctatttttttgattttatttaacattattaagattaataaattaataaaatacatgtcttactaaacaacttcaatataaaagaaagttttactttatttttattcaaaattagaaaactatacatatataataaaatacaataaaaaaactaaggtgataattaaattgaatatttattttatataacaatcattttttattaaaaggtattttttattttaacatatatttaataaggctaaatagagttattattttaatttcatactttactttttctataaacctattataattaaagtataatcatttttgcaacttgtttattttattataaaaatgtgaaacttattacataaggaggaatttaacatgaaaaatcatacttataaagaaatcaaaaacatatatggaaaaataagcccttttgaatttaaggacaaattaatagatattgcaaaatacactgcaaaagaaaataacagagaattacttgatgcaggtcgtggaaatccaaactggacttgttcaactgctagagaagccttttttacttttggtcatttcgctattactgaaactcgttctaattgggatttaggtcatttggctggaatgcctcaaaaaaagggtattaaagaaagattttttaaatttataaatgaaaatatagatatgcctggagcatatttagctagagatattataaactttggtataaatgaacttggatttgatggagatgaatttgttcatgaactagctgatggaattattggtgataactatccacttccagatagaatgttacctcatatggaaaaaatagtacacgattacctagttcaagaaatgaaatatgatatatcaggtaaatatggtgatgtagaaatttttgctgttgaaggtgctacagctgctatgtgctatatatttgattcattaatggcaaatgaacttctaaaaaaaggagatacaatagccttaatgactccaatatttacaccttatcttgaaatacctaaccttcctcgttacgactttaaagtggtaaatataaatgctaatgaagttgatgaaaaaggtgctcatacatggcaatatacaaaaaaagaattagagaaacttcgtgacaaatctattaaagctttattcgttgttaatcctaataatcctgcttctatagctatggatgaaatatcttgtaataatctaatagatgtaattgaaaattataataaagatttaatgataatatcagatgatgtatatggaacttttgtagaagatttttcatccttaatgtcaaaactaccttacaacactgttggagtatattcttattcaaaatattttggagttacaggatggagacttggtacatttgcccttcataagaaaaatgtttttgataagaaaataaatgatttaactggagaattaaaaaaatcagtagataagcgttacagtgatatgagtcttaacccttctagtctttcatttatggaaagagttgttgctgatagcagacttgttgctctcaaccatactgctggtctttctactccacagcaagtacaaatggcgtttttctctgcttttgcattgattgacaaagtagatgcctacaaaaaactcaatatgagtatctgccatagacgtcaaaaactattatttgaagctttagagcttccaattaatgaaaacaaaaacaatgctgcatattacactcaatttgatattgaagaatgggctaaattaaactacggagaagacttatttaaatttataagtaaaactgcatctccagtagatgttctttataaattagctaatgactattcagtagttttacttagtggaaatggattctatggccctgaatggtcaattagaatatctctagcaaatctatatgatgaagcttatactaagataggaaaagccataagagagatattaaatggttatatcgttgaatggcaaaaaattaagaaataattatattacactgaaatatctaaattatatgaataaaagagtttatgtagaccttaactactttttttgatataatcctatcggaattataaattttatttatgaaaggcagagaatcgtatgagtattaagaaaaaagttgccatagtttttactggtggaactatatctatgacagtagatgataaagtcggagcagctataccaactttatcaggtgaacaaatactatcaatggttaccaacattgataaagttgcagatgttgaagtttttaattttgatgaaattccaggacctcacataacaccttatagaatgatggaattgaaaaattatgtaaatgatttattagcaagaaaagatattacaggtgttgtaataacacatggtacagatagtttagaggaaacagcttattttctagaccttacaattgacaacatcaaacctgtaatagtcacaggtgctatgagaagtagttctgaacttggatatgatggttcaagtaatttatctgcatcagtttgtactgcagtatccaaagatgctatgggaaaaggagtccttgtagttttaaacaatgaagtattattagcttctgaagctactaaaacaaatactctttctctaaatacatttaaatctctaactagtggtccattaggaataattgactgcaacgaacttgtccttacaagagatattgtaaatagaacaattatagatactgataaggtagaatctaaagttgccttatttaaagcatatgtaggagaaaatgctgactttataagatttgctgttgatagtggttataaaggtatagttattgaggcaatgggtataggtaatattcctcctcaaatgctttctggagttgaatatgctagagaaaaaggacttcctgtagttatagtttctagatgtcattcaggtagagtattcgatagttatggttactttggttctggtagagatttaaaaaatcttggttgtatatttggtggggacttgccaggtcaaaaagctagaataaaacttatcttagcacttggaaaaactgataaccttgatgaaatcaaagatttctttgaaaaaggaatctattgctaattctaataacttctatttaattatttagttcagtttacaagaaaatacacacaaaccataaaatgagatgttgacaacataacagacagtatgctcctgtaaaaggtaacatactatctgttatattgtctggattcccaaattagctatttggaacttaactaaaaaatcctaatataagggcaactattataatggcaatcggaatacatactgtgtaatcctgttccatagagtcatcatctgaatgtagttttacaattcgcaatttagcaatcagtttgaagcagaaatagcctattattgttccaattacattcgtgagtaagtcgtctatatcggttgctctgtgtaacgtaaaaagctgaatagtttcgataaagagagataatccaaaaccaatcaagaatgtatttctcaaccgttcaaaggttttgctgataagcggacataaaaaacctaatggaacaaaaagtaaaatattcaaaataaaactcaaactaaatccatcactaaaaggaataagatttatgtttggattaaagaacgtttcccctaactgtgacagtcttatatattcactgaatgtagggataccaacaatatgcgatagtgttaaacataagtagtaatacattgccagtgataaaatagatgtttttacctttggaatatcactatttttcttgaatattacaactaagaaaataccaatcaagataattcccaacaagaaaataggattaattaacaataaatctttgatagcttcaaacagactgagttgaatttctacacttgattgattatttgatacagtctccatttgtacacaccccctcataacatttcaattatttctaaaaaacaaaatagaagataaatcttaaaatcatcctatcaaaatttttaaatttgcctttatcagtttataccaccagttaattcctgtcttacttctgtatggtattcttgggattctttcatcaaattagacaaaaaaatggttaccatatcaataaactggttacgctccatatctcctgaagcaaacatcccctgagaataaatccgtatcaggaatctccacatctactgcacctatcacaagtcatttgataacatcctcaaacaatcccaacttggatatatcagcaacacccattagaatactactgctgaccatccttgttttcctggtgataattttaatcaactgggaagttgaaacgcctatcttttttgcaagttcctttttagaaacatggtagttattatatgaatctgaatctcgttgtctgggtgtttaagataaagcatagatacgcaccttttttgcctgttttcattatataaaaaaaattttaaaaatacaataattatatttttttcgtttaagcttagagcagttccttgatgaacaacactttagaaactgaataatttacataccacttaatacattaacacgatttaacattaattataataatatttaaaacaacaattagagtgtataagaatgaactttttagttctttaatcatttttttgtataaaatcaaatctatttttgtaatttcaacaatgaaaaaaggcttatctctattttgagacagcctcatttattttataaatttatatttttgttcatatttttgagttatttaacaactatatttactaattttttaggtacagctacaactttaactatagttttaccttcaactaatccttttattttttcatcttctaaagctaccttttccatctcatctttagatatatttgagttaacagttaattttcctctaacttttccattaacttgtacaacaacttctatttcatcttttactaaagctttttcgtcatatttaggccagtctatatcaaatacacttccttctttacctatcatagtccatagttcttcacctaaatgaggggcaaatggtgcaattatagttactatagtttgtacaccttcttttataactgcttcgtttatattatctaactctttatatttatacatatcatttattaattccataagagctgatatagcagtattaaatccgaatttttcacttaaatcagcagtaacttttttaagtgtagagtgtatagtatatctcatatccttatcttgggaatttaattctccaaactctacatcctttttaaccacatctgctaactcgtcaaccaatctataaaccctatttaagaatctaaagcatccatcaacaccttgctctgaccagtctaaatctctttctggtggtgctgcaaataatacgaaaagtcttgcagtatctgctccatactcatctattatatccataggagatactgtattccctttagacttactcattttagaaccatccataagtaccattccttgagtaagtaagtttttaaatggctcattgaagtctaccattcccatactcttaaatgcctttacaaaccatcttgcataaagcaaatgcattatagcatgttctactccacctatatattggtctactggatgccatctattaactaattccttactaaatggttcattttcattattgctatccacatatcttaagaaataccaagaagaatcaacgaatgtatccatagtatcaacttcccttctagctggttttccacagtgaggacaagttgttgacataaattgctttgaagtcgtaagtggagattctccctttccagtaaattcaacatctgttggtaaaagaactggtaaatcttcctttttaactggaactattccacattcatcacaataaaccacaggtataggacaaccccagtatctttgtcttgaaactaaccagtctctaagtctataattaattgttctctttcctctaccttctttttctaacttatcgattattccttcaaatccttctgaagcatctaatccattaaattcttctgaatttatcattttgttatcttctgttattacatcaattatgtctaaattatatttttcagcaaaatctctatctctttcatcatgtgctggaactgccattatagcacccgttccatactcaactaatacatagttagctatccatagaggaactttcttgccatttaaaggatttataacatatctacctataaacattccttctttttctacatcagctgctgttctttctatttctgtcatagtatgcattttttgaacaaaagcttcaacatctgcttcatattcagtccctgcaaccaattctttaactaattcatgctctggagcaagtaccatataagtaactccataagttgtgtctggtctagttgtaaatactgtcatagatttatcagttccatctatatcaaaaactaaatctgctcctgtacttttacctatccaatttttttgcattgttttaactttttctggccatccatctaatgtatctaagtcattaagtaattcttctgcaaattcagtagtcttaaaataccattgttctaaatctttctttaatactgttgctttacatctctcacatgctccttgaacaacttgctcatttgcaagaacagtctcacaagaaggacaccagttaacatatgattttttcttatatgcaagcccatgctctaaaaacttcaaaaatatttcttgtgtaaatctatagtattctggagttgaagttgcaacttctttatcccaatcataactaatacctaataaatttaattgctctttcatttcttctatattttccattgtccatttatgcggatgtattccatgttttatagctgcattttcagctggtaatccaaaagaatcccatcccattggatgaagtacattatatccttccatttttttgaatcttgcgacaacatcacctatagaataatttctaacatgtcccatgtgtatttttccagatggataagggaacatttctaatgtgtaataattaggtttttcagtttgtgcagtatccattttatactgattattatctttccaaattttttgccatttcgattctacttctttaaaattatatacgctcatattttgcctcctatttttaattgtgtataactaccttatttagtattatttacttataatttccaaataattctttgaaaataaaaaatcctcgtcactaaacttacgtttagggacgaggataaatcttcgcggtaccaccctaattagcctactacatatatagactctcttagatagcttttaatccagccatggagaatagattttaatctagtaagttcaaagttatataatattagttctcaccttccactaactctctgaaaaaatataatcttttactgctctagtctattcaatttaatataatttttgaaattttctaattataataacatatattatcatgtttatgctaatgtgtcaatatctatataaggtgcatctttccataatttttctaaattataaaaccctctattttcctcattaaatacatgaaccattatgtctccataatcaaggagtacccaagtttgagttccttgtccttctttacctcttggctctaatcctagttttgctaattcatcttccacattgtcagcaatagcttttacctgtctctgagaagatgctgtagtaataataaaataatcacacaaactagaaacttttcctatatttattataactgtatcttgacccagtttatcttctatggcatcatatgctatttttgtcatttgttccactgtcatataaaaattcctcactttcctaattaaaatacacttagttattgtaacatattaatacgattttgtaacatagtcaaatttaaatttattaatatgtttgcctttatatagcttttttataataacttttctttaattagatagtttcttgccataactgttcttggatgtatctcttcttttttattgatgacaaacattaaagtattattaaaagaagttaaaagtgcttcatcaagcttccctccatatgctaattctcttaatgtatctacaactggaaattttcttccttcttcaattaaatcagctatgtaaattattttttctaaaagagacatgtcctctctccctgttgtatgatatttgattgcatttataatatcttcatcttctacttcaaattcatactcgcatatgtacgccccaattacactatgagacaaggaacgatttccatcctctattgggtctaaatatatttcatacttatttacataatcctctatttccttgtcacttaaatactttgcacaatcatgaatcattcctgctaagtaagctttttctttgtcacatccataaatctcacataatttttcagcacattttgcaacatttcttgaatggctaagcctccccactggtagcatttgatttagtctttggttaatattttctaagttcatttaatcatctccatattgatatagtttattttcatataaataattttctacattttcgggtactaagtaacgtattgacttgccttcatttagctgttcccttatatatgtggacgatatatccagtgatggaacataaactgttataatgtcagcattatacttcttagttagtttttctatagtctcttgtgaccttaacaaactaattcctggtctagttgcggctataaaagtagctaactcaaagtttttctttacatctttccactcttcaacactacaaattgcatctgcacctgttataaaataaatgtctgcatttttgtattttttctttaagtattttaatgtatctattgtataagtccttttctttctttcgatttctacttttgaaactaaaaaatcttcgttgctttcagttgctagaagtgtcatattatatctatcatacttatctgtagtgatacataatttatgtggtggatttcctgatggtataaagattattttgtcaatgtcatacttgtctctaataaattctgctgttgctaaatgagcatagtgtatagggtcaaaagtacctcccaatatacctattttgattttgcctttatggcgattaaatttctctagtttttcagtatttttcaactctgccatcttaactagattttcacttctcatattttgtctccttttaatgttataatactattgtaccattattttttatttcttaaagcttataatttgtttttttgggtatataattatatttatatgctaaaaaacactttaaaaaataattatttaacatgattctgctttactttttaataaaaataactttttactattttgtcttaattttgataaaatataacatacaaatataagttttttgttaaattttattagttgcttttgttaatataattacatataaaaaaggaggacttatgggtataattacaaaaatagaacaacaaaaaagaaatgatgatagagttaatatttatgtagatgataaattttttattgctatatttaaagaacttgtttatacatttaatttaaaaaaagggaatgaaataaatgaagaagaattaaaacctattttagatgatgaaatgtatataaaagctaaaaataaagcattaaatattttatctcatgctgaccaatctgaaaaaaaattaaaagaaaaactatcatcagaatttgatgaaaatataattgagagggtcatagattttcttaaaagttataatctcgtaaatgacagtgtattagctcaaaaaattgttaacacaaatgttaacctaaataaatgtggcaaaaacagaattaagcagaatttatataataaaggtatcaatagaagtacaatcaatgaagcagtatctgaattagacaaggacactgaatttgaaaatgctatgtatctagcaaaaaaaaggtatgaaagagtaaagaaagaagataaaaagaaaatatatcaaaaaatttctcaacatctttcctataaaggctttgattatgatattattaaaagagttttaaacaaacttttaaattttgatgaatacgatatataagtataaatactagggaggtaaattatgaaattaatcattggtggcttaagctttttattaggattatataatatatatcaattatacagagaagatagtatgagataaatattattttttaaatgtaatatttattatggaggagaaatacaatgaaaagtcaaaaaagatttaaaattttagatattgatgtatacctacaaccatttgaatctgatataaaaaagcgaatgaaacattatgaggatatgaaatcaaaaacattgaaaaactataaagattttagttcttttgcaaatgctcatctttactatggatttcatcagacaaatgatggattcttctatagggaatgggctccaaatgcagatagtttgtcactaattggtgactttaataattggaatagaaaatctcatcctctaagaaaaattgggtctggtaattgggaaatatttattcctggtcaaaatagcttacctcacaaatcagaggtaaaggtacaagttactgcaaatggaaaaacatttgaccgtataccattatatataaaaagagtaattcaaaaagattttggtggatttaatggacaaatatggcaaccaaaaactccatttatctggactgacaataattttgacttaaaaaacataacttctccactaatctatgaatgtcatataggtatgtctactgaaagcgaatctattggaacttataatgaatttactgaaaaaatacttcctaagataaaaaaagctggatacaataccattcagcttatggctattatggaacatccatattatgcatcttttggataccaagtttcaaacttttatgcaatctcatctaggtttggtactcctgaagacttaaaaaacctcataaacactgctcattcaatggggattgctgttttattggatttagttcattctcatgctgtaaagaatactttagaaggaataaatgagtttgatggaagtgaacatcaatttttccactcaggttcaaagggaaatcatcctgcttggggtacaaaactttttaactatggtaaacctgaagtaatacattttttgctttcaaatataaaattttggttaaatgagtaccattttgatggctttaggtttgatggtgtgacttcaatgttatatcataaccatggtcttggagtttcatttgatagttatgaaaaatattttagtatgaatacagatattgaagctataacatatctccaatttgcaaatgaattaataaaagaaattaaacctaattcgataagtattgcagaagatatgagtggaatgcctggtatgtgtatccctataaaagacggcggaattggatttgactatagactcgcaatgggagtacctgatttttggataaaaactatctctaacttatctgatgaagactgggatttgggaaaaatgtggtatgaacttactactagacgacctggagaaaaaaatataggatattgtgaatcccatgaccaagcattagttggcgataaaacaattattttttggctagctgacaaggaaatgtactggaatatggaaataaactcaaataaccatgttatcaatagagcaatatctcttattaaattaattaaattaataactttttctctagcaggtgaaggatatctaaattttatgggaaatgaatttggacatcctgagtggattgattttccacgagaaggcaacaattggagctataagtatgccagaagacaatggagcctttcagaagataacaacttaaagtataaacaattattaaattttgataaatctatgctcgaacttacaaaatacagtgatatttttatccaaaatagtcatgaacttatacatatggataatgataaaaagattttggtgtacagtaagggcaaatatttatttatatttaatttccaccctaatctaatacaatcagttgatatttcaaagtttcaaaatacaaactacaaaacgatattaaatactgatatggtagagtttggaggaaacacaaaaaaagaaaacttaagagattatgatgtatactttagctcaactcctccttcttctaaaatgcctattgcctctcgtacagcaatagtacttttagataatggcatttaaatatgagccaaatatattaggaaactgcaaatgtagtccagtataaggcaaaaaaataaaataatgaaagcatggcaatatacctgttcaacatgctaaaaagacatattgacaaatcagtattaagccttttagctcccaaatatgacattattataatccacactctaacagtttgttggtttttctagtatataacactcatattaaagtaaacactaaaagccaaataacaatttaaatacaaaatgttatttggctaatttagtttgatactatttaactatcttttacattcagttctataatttccaacttttaatttgtggtattatattcatcttaacagtttgattctttaaagcttttctaaatttctcagttgaagaatctttaaacattttactagaagcactcttgaggtcttctatagattcccaatgttgtatcataatccacttttgagacttttcatcatataaaagctcagtatcaataaaaccagattgaatagaatgaaattttaattctaagtcatttacaatttctataaactcttcttttgataaattttcttccacattaaactcaactatttctgtaataattttcatatgtaaaacctccaatttattttcctatatcatatcaaaaaataaattggaggtattgtaaaaaatcgacagtataattataaatagttgtactttatattttctttaatcgtcttattctcaccaataaatttaattggtgacgtccctgaaaattttttaaattcttttataaagtgtgcttggtcatagtactcattttcataaataaaatcaaaaagttcattatctttataattataaataagttgactacttgccattttaaatctgtaaattctctttaaaatcttaggtgtataccctgtatattttaaacagattctttccaatgttttaatatttatatttgtattatcacaaaatgcttttatattgctatatctattatcatatataaatgaatttagaagctttacagatttatttgaaattaaatcttcttctaatatggataataacatttcttctaaatataaaacaattttttctactgattgtgttggatttaatgactcttccaattttttggcaaatagttctgatactgcttctaagtcaacaatttgtctgttaaactctgaaattggtatctttaaaaatggatagagaccaaatggataaaaagaaatccctataacacgtatatttccatgttgaataataaatccatgtttatcccttattccattaaaatgcatattactagcagtatagtcttgattttcaattttatattccataacatcagaaagattaagaataatatctatactgtctgtaggaagtaacttattatttaacagtatatttgattttgtttcaaaataccaaataaactttacccacggctttaaacgaacatttttgattgaatatcttgtaactgataacattgtgaactaacctctatactaaaattttttaattatgtactccatcttaatattatacagtataatttatgctatcataaattttagttcactttatatttattttatacattttttcaataccttagaaataggaagcgctattataagacctatcaatacttgcattaagttacctggtattgaagtaagaggtactataaaattaccataaagtataacttctgttatataatatccaaataacatccaaattgatgagacacatattcctattacattgattaaaaaattattcccattattaccatttgcccatgcaatctttccaagtaaataacccataactcctctaactataaaggtaaacggtgcccataaagtccacccagatattaaatcaaaaagtgacataccaatagctcctgataaagcaccttttttacttccaaatactattgctgatatgaacaacattgctgttcctaaatgcacaagcccaccatttatagatattggtaatcttatatttataaatttagttgcaataaatactaatgctattaatagtgaggtttccaccatgtctttcgttgtaaatttttgcttagctgtaacttccatactatatccccctatctattaaaaataatacttattaaataaattcaacaaattttcatttcctttgaatcctaatgcacttaaacttttatccaagacatttagtacatgctctattttatttagatttgcattctctcccatatgacctattcttaaaatagtatccatatattgatttagtgatgttgcaacaagtgtattataatttttaagcatataatcagtaagttttaaagctcctatactttcaggaatttttatagctgtgactgtattagaatatccttcttctaaaaatagttctagaccatattcctcaatagattttctaacactataagctatcttttcatgtctatctaatacattttctattccttcttctaatatattatcaagtgctttatcaagccccattatgtcacttattggcattgtataagggaagtattttttttcataatagccttcccatatatttaaattacaataaaaacctattacatcagtttttctattttttatacaattttttgcatcttgacttattccaactatagtaagtcctgctggtgcagaaatagctttttgtgaaccacctaatattatatctattttagattcatccacacttaatctttctcctaccatacctgctacagaatcaactacagttaatattccatattctttaagtaatggacatattttgcttacatcatttaatacgccagttggagtatcacaatgcactactgttgcatatttaaaattactatcctcatctaaaaatgctttcaattcatcaatatctatacttttagtatattcacttgaaaaaagcacatactccccaccatacattgttacaaaatctttaaaaccttctccatatataccattgtcaattacaagtactctatctcctttttcggtaagtgatgcacatgctgcttcaagccctaatattccttcaccactcaatatgtaaacatcgttttttgttccaactatattgccaaacttctcgcatgtctttttataaaattcaacaaaatcaatatctatatctggatttgttgttttttctgctcttgctaatcttacattttccctagtttcagttggtcctggtgcataattaatcttcttattcatatatatcagctcctatttattttctatacgattattatacaaaattttcattttatatggtacaattttatacttttttagaattgtaccgatacattttctaacatgaataatatcagtatattagatatattattgattacataataaaatacagagcaaacatccgtttaaattgtttgctctgtactatgctttaacctatttaattatgaatctctttaactatattttttatatgctttttgctagttaaactaaccacaaatatttgcattttattcactgtatcttactctatcaataagagattctttattaaaacttcgtcctatcaaataagttgttataaattgagctataagaatacacacaatcatcaacaagattggtactattggcaaagaatatgttgcataagataatccagtcttttttagaaatataacagcaatataccctaatatacctccaaataaaatacttcctatcatcattccagaagtgtaatacattgcctctgaattaagcattttcactaattgtttattagtaagaccaatagcttgaagcataccaagttctttttttctagtaactatgctagttatcattgtgttgacaagattcataaatccaatcacacctattatgcctgttagcgtgtatcccattatctttataaatgaaataacagccttatttgactcaattctactatctataaaatcagtctctaaaaatccattatttttagcaatcttcttgatactatctttgatttcttgatactttccttcttctgtatatattcccaagctactagttgaatcgtattttaaagttctatcaataaaatccttccctataccaaaacttggaacccccatagctattgcttgaactttaaattctttttttatctttttatctccatcatataaagttaatcttattttatctcctgcttttactcccatttcttttgctgtatcaacatgagtaattactatttcatctccagtttgcagtctttcaagatttatttttccatctattagattcttgtttaatgattttacatcattttcatttatactttgtaaaaggtcatacttaaattcaacatcatagtcctccataccaatttttacacttcttgcagattctattcttttaattccttccatgttctttatttgattaaaaaaatctttacttagaggattatccatttgtaaaatattcaaattatttttaggatttttatcactgttcatttcataaccagatagtctaacttctatatcataaggaaagtgttctcttgccattttctcagcatcaaaactttctaaagcagttgatactgttataaatatagttccactaagtataagtgatgccaatgtcatgtaagtacgttttttatttctttctaaattggcatgtgataatctctttagatttatatttttatatccttttctcttactcttattacttattttatttcctgtatatcttactgcgtcaacaatggatacttttgatgctactttcattggttttaaaagtgataaaacaacagatataaagcttattaccacaaccgataatataactggtaatcgtgatgattttacatctatatccataaatgattttattataatatttgcaagtacatagcctaaaattattcctattggtattgctattccggctaatataaacccttccttaaacactatattttttatttgtttcttagttgcaccaattgctctaagttttccaaattcttgaacttttgtaactattgaaatataaaatatattgtatattactaaaatactagataatacaattactaatcctacaaaacctccacccataatcgtttccatatctggttttaaagcatttatataattttcatttacagcagtattaatagtatcaagtcctatatcattagcaattttatctaatttttcttttgcttgctctattgataaattacttttatcattaaattttacataaatattaaaatcttcttgtgacatatctctagtatttctcatatataattctgatataatagcataataatatttacctgcttcagatatttcgctagtttttaagattccacttataacgaactctttttcaatttttttatcatttttatagtcattataagatatttttatcttttcacctaagtctttatttttataaccaagtgcctttaaagctccactatctaacacaatttcattctcttttgttggcaattttcctttgataagttcaaaactatttaatttcaaagcatcttcattcatgtatgctagagaaatatttgaatcatcttccagtttttcaacacctactccattcatttcaccagttaattcaacatctgcatgattactcaatatatcagcctgtttttcatctacatttgctaatataccttgataattacctgaatactttatagtattttctttttgatatgctcctgcatcaacaatataaattccaatagaagaaagcattaaagtagaaagtattatagtgattattattagaatactttttgatttattttgttttaaattactttttgctattttagtagtattaatcatttttatcaccaacctttgacaccctgccatcttctatgaatataactctatcagccatttgggctatactgtcatcatgagttatcataactagagtttgactgtacttcttagacatagattttaatatactcataacctcatcagatgttttagaatctaggtttccagttggttcatcagcaagtattatagctggtcttgtagctaatgctcttgctattgccaccctttgttgttgaccacctgataatgtatttggtaaaacgtcatgtttattttcaagtcctaatgatttcaaaagttcttttataaaagattcatctacttctctaccatctagaccgattggcaacactacattttcccatacattaagagatggaattaaattatagctttgaaatataaaccctatttttcttcttctaaacacagctagttcttcttcttttaatgtaaatatatttttattatctatatacaccttcccagatgtaggtatatcaagacctccaatcatatgtaaaagtgtactttttccagaacctgattttcctattattgcaacaaattcaccttcatttatttctaagttaacattgtccaaagctcttactaagttttctccttttccataatgctttgataaattttcagtatatagtattttcataaaattatcccctcattctaagttatattaccccatattttattaattttttatttctggagctgtttatacttatataataaatgtagaggcttacattttcctttcatttaatattacatagttgtaagaaacaaagaaaacttactccctatccctacttttgaagaaactataatatttccaccttgttcttctaaaatctttctacttaaatacaatcctaccccactaccttctacagattcaatttcatcagcagaacctctataaaaacgtttaaatatattattaaactcatttttttcaatccctatgccattatcctctattataattttaaagaaattagcagtttcttctacagatatatttatttctccatttacctgtgtgtactttacagcattatctaatacattaaaaatactctcctcagtccactttttatcatgtggtataattctactgttaaattcatttaaatttaatgttatacttttgctcttagccttaggggtaacactttttactgcatttagaatagtattttttatatcattatcttctttttttatgtttatcatgctaatttctaaccttgatatgttcactaaagaatttattaaattttctaatttatttatagaagccttattggttaataagaactcgttggcttcatcttcttctaatttttcttctataagtaatgtattgtataattttaaggatgctaaaggagtttttaattgatgagaaatatctgttactaatgattttacactttctttttctttttctaatttaataaactttatctttaaacttctattaagctcatatagacagttatttatcttactaaatgtaccttctttaaaatactcattatattctactagataaccagtttcttctgactcagtagtgtccttcaagtagttttcttgtgccatcttatctactataaaataaattttactcaatcttttatttatgtatcttataaaataatatattatacctataactactataaacatcattaaaaaaataaaaaatgattccttaaaaaaagattttaagtataaactaaaatttttatcatttgacattttattttccaatccatagccaaatttcttaaatgccttttctccagtagacaccttactataatcggaattataaatagaatttactatatctatttcatcattaggatatttttcaatcaatattccagcaatattttgagtattttttatttgatgttcatacaatttatgtaatctgctatattcaaaaagtataaatacaagggttactattagtacagataaaacagaatatacaataactcttctcattatataatcatctttcacacttaaaccatctttgaggttcatattttttagcatttttttatactcctttctccccacatatatccaacccctcttactgtttttatatatttaggttcagatggatttttttcaaccttttgtctaagtcttcttatatttactgcaatcgtattatcatctacaaaattaccactactatcccataaagattctaacagttgttctttagtcaatgtctgcatagaattttccatcaaatattttaatagttttgtctctgtcttacttaaaattatctcttcttccttatcatctgttcttataattaatttattttctatataataaaagaataaatcatcacaaactaatagagtataattttttactgtatttactcttttcataagcgcattcacttttgatattaataccatcaagctaaaaggctttgtgatataatcatctgcacctaaatcatatcctgtgacaatatccacctcttcatcaagagctgtcaacattattatgtaaacatcacttttctttctaatctcctcacaaaagtcaaaaccactaccatcaggtagacctatatcggaaataattaagcatatctcttcttttgcgaaaatattttttgcttcttctataccaaatgcactaaaaacattgtatccttctttttttaatttaaaactaattcctctatttaaagatttgtcatcttccaaaagtaatatattattcatccctatatcctccatcatcatatatactagctaaattatatcatactaataaaatcatttttttatcaatttgtaaatatatcagaagttgttaatatgatttcatttacttgaataaaaactaaaaatccccataatactatgccatttagtgtaattatttttcataaaatacaattttatttaaaaataatcatgttaaagcataaaacaaaggaaattagtatttatataactaatttcctttgctgtttactattatctaaaattaaattactatctactaattttgctcattaatttttattttgactttttatcctttaactctttttgattaaaattcaataaacatatcaatgtacttgaaactataaatataattatactatttgaaaaacctaaatctcctgttttaggagatttttctttagcttctcttttagatattccttgattagaactttctctagcacttgttttatctaagcttttatttttgtcactatcagagctttttatattattagatagattctcttcattatcattgatatttttttcattttcacttaatatcaaatcactctcatgattcttgcttattaactcatctttagatttaataccaattcttccatctacattttttgatatttcttttttgtactctatatattcaatgactgcactctctaaatttccaaattcctttagtattggctcttttgaaaaacaaggaaattcatctccacctgaggctatataatcattcgttgcaactacatactttttatttaaatctaatggctttccttctttttgaatacttgttattctttcgccttctttttgtttaggattaaagtagtatgaaattcctcccacttgcaaaaaggctgaacttttttctggataaagttttactccatgctccaatacatctttaatctgtgctcctgtaagttctttggtaactatagtattgctaaaaggaaatacatctacaatatctcttcttgttatattgcctttttctatcgtatctcgaatattccctccattaaataaagaaatatcagccttagttttatctagtaaaatgtcacttattaaattacccaaattagtttcttttgtccttacattttcatatgaaccatctagagtatttgtagttgcacctataactttatctaatattttttcttgttgttcttttatttcatcaacctttttacttacaacgtagtcaagcttatactttaatgcttcttcttttccaattaatctaactgatttattttctatttttatattttctacatcattagtatccaaagttagttttatctcgccaatattttctaaatattgtcctgcacttacaatcaatgtatcacccacttgtttaccattttcaaacttagtgtggctgtgtccatcaataatcaaatcaattccttgaacctcatttgctatatctatactatttggcttacttaaactatttgtaccaatatgacatattgcaactattacattggcaccttttccttttaattcatttacttgttctgttgcactttctataggatttttaaactctaatccttccacatttttaaatccagttttgttctttgtttcctgggttgagagtccaaaaaatcctatttttattccatctatttcttttatatcattactatcaaaaactttttttccattttcaaaaatatttgatgataaaaattttaaagtattctctcctaaattagcacttttagataactcaaacagtctatcttttccataattaaagtcatgatttccaggagtaatatagtcatatccagcacatttaattaattcaattgcacttttccctctatccatatttactattggaagtccatgcaaacaatctcctgcatctactaaaattgagtttggagtttcttttttcaatgtggctagatttcctatttgtatatggtcatcaccttcagcatatcttccatgtatatcattagtgtgaaaaatggttatttcttcaaatcgctctagcccataagaaataaaactctgacttgttgtaattagaattataattaccaaaattaaataccttctaatcttcaatataaattagcctcctcaaattagttttagctttaatataaaatttatattttacataaaactttttagataaatattaaactatagtaagattgattagtgtaatttttaatatttatctatcaatttaattttgtccatatccaattagttttaatctaattacattttttcacatctatatttttcttttattatataaaattattattttaaaatcttttcaactggtctcttttaaaagtccattgaggtattgtcaaatcaccttcaaaatctaaactataccaaggactcaaatttggatttttacgattaataagaagttgcgtttgttgtgcaggcatatagctttgggctatcataaatacctttttaccagtcttttcattttctgccatatccataattatacttgcatgtcctggacttccaccaactataaacacatctcctattttcatatcctcaacttttacaggctccaattctttttcaagagataacgttcctgaatatgcaaacactatatccataaactttctgaaactctcataagatgttgaatattcagttgctttataccagcttgaaccactatcttttactgaaattctatatccttgtgcccattttgaatacttcgccttaaaaccatcaacaaaatcaaaacttatttcatcatatagtttattctgatacaagtattctgctctcataagcataatcgcatctgcacattgatgcaaatctctattgccaatatcaacatcaaatacactatcataaataccttttgattccttaattcttccatcataatactttactttctctccataattttttagcttagtattcctaagaaatgattcaaaactacctttttctacatcaactcttttaaatccttttggtggctcatacctatctttcaatatatttgcatctttatgtactattataggctgttcatcttttttagaattttgaattttcttagaaccttcaaccacttttttatcttctccgttactacaaccaactaaggttaatgtaatcaatgacaaaatagtaattttctttaatactttcattaaattttcctcctttaaatactcctaaatataattttcacttttcgttctccaaatttttatacattgctatataaaaactttatttgataatatttcttgactcaaatacacatttattgttatatttaatgttaaaataattataataggatatcataataaaaacaaacaacagatttgtgttaattttagaaaggggaaaaaatgatagatttaactttacttggatgtggtggaaatgtacctatgccaaacagatttctatcctctgtatttataaactataaaggtagaaaaatactaattgactgtggtgaaggtactcaggtatctatgaagctaaaaaaatgtggctttaaagatatagacttgatttgtataacccatttacatggtgaccatatatttggacttttaggacttttatcaacaattgggaatagtggtcgtacaagtgatttaactatagttggtccagttggaatagtcgattgtatacgttctatgagaaatttagtagaatatgtaccatacactttaaaaattatagaaaaccctcaaggcaatttttctttagataataaagttttaagaaatttagaaatttcaacaatcagtttagaacactctatagagtgtttaggatacagttttaattttagaagaaaccctaaatttgatatagataaggcaactaaaaacgaagttcctaaaatattatggaacaaactccaagaaggtcaaaatatagttttaaattcaaaacaatacactccagatatggtcttaggagaattgagaaagggagttaagataagtcttacaaccgatacaagacctatagaatcaataccagatttcataaaagatagtgatttatttatatgtgaagccatgtatggtgatgatttagatatatcaaaagctgttagaaacaaacatatgacttttagagaagctgctaatcttgcaaaacttggaaatgtcaaacaacttttactgacccattttagtccttctttagacatacctagtatgtatttagaaaatgctactaatgtttttgaaaatactattcttggagaagatagattaagcttgcgtttaaattttgatgaataatttaatggaatccttatttctaaaaatttggaataaaaatttagggatgaattttaccatgataaaaatagtttaggtaaattcattcccttaattgcttgtcaactatattagctataatctaaatattatttagacacatttccagctacatttaaaacatcccatgttcttgcaaatggtggggcataacataaatctaacattccaagttgacttgtggtcatttttccaaagatagcagctgccaatacatttgctctttggacagcatccttaaacccagccacttgtccgcctaaaataacttttgtatctgcatcataaataagttttacatatattttatttcttcctggataataatgagtttgattataatcagaaataaatttagatttgacatttatgcctaaatctttagcttgcttttctgtaattccagttgatgctgcctccatatccataatttttatacaacttgaagatagtgaaccttgataagatacttctcttcctgctaggttttctcctactatcctacctaatttattagctccagtagctaaaggaacatatacattttcattacttactatattctttatagttgcacaatctccagcagagtatatatcttctacagaagttcttccatattcatcaactactatagctccattttttagcatttttatattagtatttgacaaaaactcggtattaggtctcacaccagtagcaattattactacatctgtatctatttcccctttgtttgttataactttttctactttatcttctccacaaagttctacaaccatttcatccaagtgcaaattaacattatgtctatttatttcttcttctaatacatccgtcatctccttatcaaatacttgtggcaatattctatcttctaactgaattacatctacatctttacctaatttcttacatgcctcaactgcttctaaccctataaaaccagctcctattattgtcactcttttattatcttcattacttaaaagtttttttagatattctccatcatataaactttttaatgtagaaacattcttcaattttatgttttttataggaggcataatacttcttgctccagttgctatcatcaatttatcatagtaatcttcatatatttcatctgtttttatattttttacttttattttcttagattcactatcaacctcaacgacttctctaaatatatttaaatcaattccagcttctctaagtttctctggtgttcttgctaataattcatcagcatcatcaaaaaaaccaccaacaaagtatggtaatccacaagcaccaaaagatactatttcagttttttcataaacaacaacttcatactcaggttttattctttttaattttgctgcagcactcataccagctgcaacaccaccaattattactactctcattttatctctcctttgatgtctagttaatttcttcacttattttaagcttttcatttgatatatattctatgtaaacatttttcataacaatttttagttatttatttaacatattttaatttgaaatcaaatattataaaagctattttttattttcttaccacaattcaaattctttaaacatttattataccctatttttctatacttaatcacatttttcaaaatcaatttattttactctatttaagtaaattgtgatataatattgacatttttttaatatattggtatcatttaaacttagaaaaatttatttttaaataaaaggagaaaaaatattggaaagttcatttttatcacaatttcttatgattacagattttaaaacgatttttttcataatattacttctaggtacattctttattgttagacaatttgaaaagaaaaaaataaaattttcattgagaacaatatatgctacagtactaggactcatattgggaatcataatacaagcttttgctggttttcctaatgataccactcaagtcacttggctacaagaagtaagcaagtggtatagcctatttggttctggatttatggacttattaaaaatgttagtagtacctttagttttcttatccattataaaagtaattataaatatgaaagataacaatcttggaactctgacatttaaatctttaggtatgcttcttgctactactgctatagctgcaattgttggaattatcgttgcaaatataatgaagttaggtgtaggagctaatatgcctactttagttgaaaatcaagaacttaaagaaataaactctcttgtggatactttaagaggattactaccatctaatcctgtaatggctatggcaaatggaaatattgtagctacaataatatttgctacatttatagctacctcaataaagagattaagtaaaaaacactttgaaacaataaaaccatttatagattttatagaagcatcttacaaaataattgtaagtgtgtctatgactgttattaaatttatgccttatgctgtggttgctctgcttgcaaatacaataacttcacaaggtattagctcaatagtatctgttttacagtttatattagctctttatatatcagtggcaatattatttaccatacatttaatttttataactttaaatggtctaaatcccattacttatataagaaattcaactgaagctttacttctggcatttacttcacgttctagtttaggaacattgcctgtaacgatagaaagtctagtacaaaatcacggagttgatgagggtgtatcaagctttacagcaagtttaggtgcaaatatgggtatgaatggttgtgcaggtatatatcctgctttaatggctgtaacacttgccaatatggctggagtaaacatggatatgagcctttatgttatgttgttaattgttataacaattagttcgtttggaatagctggtcttccaggaactgctacaatggccgtttcagttgttatctctggagttggtcttggttcttattttccattagttggtggtatacttgcaatagaccctatactagatatgggacgtaccatgataaatgttaatggtgctatggtatcatcaattactgtaggaaaatcacttggaaaaatagataaagaagtatttggtaaaaaaaacatttcttagagtaacacttaagataaatggctaacttttaactagttagccatttattttttattttataagaaaatttctttagaaatttacttacaaaacggaaaaaattcttttgtaagattttggggatatacagatataaaaacaaagtcatagtcatgggattttgcatattctagtatatctccatcataatatctagggtctatcatatctatagatgaacaaacagaggaaaaaaatgctgctgttggtacaattagagaatctttaacaaacagcacttttaatccatctggattttctatattttttattttaactaatggtctattccccaataaatatgtaaaatacttatctgattgaccatccattaaatcaaggtctgcattaaaaggatatgataatattaaactctcttcaaaccttccttttaattcaaatttttgagatttagaatctgtataataagtataattagtcttaaatttaggataaattaatgtaaaatcatctataccaccatataagataccagtctttcttcccatagaaccaagaaatgacttaggatatacaattgagttataattttctttatctctatagtaatgattttcatctaaattcatattgtattttttattaagttgctcaactaattctccaaatgcccaaaaagaagtttctactttccagtgatggtctgttttaaaaaataaatcatcttttggaataccactctttaaaatattttctctaaaatcaatatagtccacattatacttttttagttgatttaaaaaattatctgctgtctcattgctataagaataaggtattccttttggaaattttgtcactccttttatatacttatctggagtcattaagtaaactaatttagtgttttgcttttccatttcctcagaaaattttcttaccctatctgctatcacaccaactggatttggagctttagcaaaatatgtataatgcatctttccagaagtatcttttacaacactaaattttgaaaactcatttttacccattaacttttgtaagtagccataagtttcaatgaacgtatttttatatattactttgtcatttactgtgttatcaatagatgatattgtatcttttaaactacttttttcagcaactgaattttttatctcctgtatcatatcttttccagaataacaaatattaaagatagagaaagcgaataaaataattaagaacataattgcagttattaatcttactttaaaaaatctattcatacttttcctcccaactaaaaattaaaataaataaatggattatagcttccagttactaaatatgtcacagaaataaagaacaataaaatagctgagattggataaaatacgttaaatatcatactatatttagcttgttcaacaacaaacttattgattttctttgcaataggtacactaaaaataaatgcaaatataaagaaaacccagtattcttttaaaaacatatatgtataatcactccatataactccattgcctccaagcatagctttgaaataattatatgcttcttttaaattaggtgacctaaacaatacccacccaaagttaactactaataacgcataaatatgttttataaaattgtgattttcaatcttttcaaacattataaatcgctctataatcaagaaaacaaagtttaaaatcccccaaattacaaatgtccattctgctccatgccatattccagtaaataaccacactataaacatatttctaatcataatatctttatttgctactctagaacctccaagcggaaagtatatatagctcttaaaccacattcccaaagaaatgtgccatcttctccaaaactcactaattgattttgatatatatggataattaaagttctcttcaaatttaaaaccaaacataagacctaaacctatagccatatctgaataagcagaaaaatcaaagaatatttgcatagtataggctattgaaccaagccatgcaagtgatgcagctatttctccttgactattcatagtgtaaatatagtctgctactatagccatgttatttgaaattaatacttttttgcctagacctgttataaacctgcaagtcccaatagaaaatttattccaagtttcttttctattgagaatttgttctgccacactctcatatctaactataggacctgctattaattgtgggaaaaatgctatatacagtcccacataaaaaggattcttttggacttctccatgtctacgatatacatctataacataagacattccctgaaatgtaaaaaatgaaattcctataggtaaaacaatactaggtatagttagttcagtattaataagttcactaatatttcttagcgcaaaagctagatatttaaatataaataaaacacctatattatatacacacatcaaaactaaaaaaacttttacttttattttactttccctatatctatctactagtaaaccaaatatatagttcattattatggaaactatcatgataacaacaaattttggctctccccaagcataaaaaaataaactaacagcaagcaatatcatgttctgtatcgttcggttaaacctaaatacataatataaaaccaaagttataggtaaaaaataaaataaaaaaattaaacttgaaaataacacaatctaacctcctctctttacttagtttttgaacattttttccaatataaatatattccaaagcatattattactagagatacaaataaaattcgaacaaacgttatgatgttattcataaagtttatttttttcatatattgtactgttggtgattgctcaggagataccaatgtatatggaacaccatccttatcttttttattaatactccaagattcagttaatgctattttccttccaattttaaacttatcatcaacattaacttgtaaaataatttgtccaggttcggctttattacttaatgttaatttaccattttgagatatgctcacattatcttgttttcccataagagaatacttaattttagaatcacgtttaagacctaatacctcatactgacttatactttgacccaatactggtatttgtacttcttcattgccagttattttaatattatgtaaaaaacttaatttctcttcagacaataaagatatcttttttataataacaatattatgttcttcatcagatggaataaatgtaattccccaactaacaatgtttgaaagcatacttgagtccagcacaacattacttttctcatttataaggctattaaagttcacataaattttgccttcaaattcacctggtacttctatgcatccttcttttattttatctgaatatattatatttttatcttccaaaaatatttcactaccttcttttaacctaaattcaagcatattcttactttgtatacttaaatttattttctgggaacttttatttttattttgaatttcaatataaaaattattatacatactccaattttcttttatattttggtaaatatataaataacgttccttatcacttttagaactatctgtttctatttttacacctgtatcttcatatgtaatcctagaacttaaatcagtctctatctttttaaaggataaatctaaaattttatcacttgtcgctgaacttataaaagtagtatttataaaaaaaataaacaccaaaataagatattttgcagaacaaaaaaacacttttaaagtcttcatttcatctctcctaaatatattccatgggttcaaactcatctatacttttttccttcttttcactaggatttgaaacaggaattgtcttattttgtaatatccaatccatcatttcatctcttaaaaagaaattttgcattatgctgtcaatgttatttactttatataagagacctctttcatcgattttaccctcacataaatcacattctaacacaatattttcattaatttccaatgctatttctttaggataaatatttttattctcaaaatttaataatacatattgataattaaaatttactattcttaatttacctgtattttttatatccatctgaaaattcatattgattcttggacttcttcgtgataatgttctaatcttttcaatacgtttttttacattaatttgcaaatcatcaaagaaacctagttgattagatattgtcatcggtaaagtaggtattctatcgtgaacaatacacatccaattatctatttcactatcttcaatatgtgtaatataagctgcatatttccactttgaatttacttccacaacattaacaatctttgctttcatattagctatatacatttcatttcctgatttttctctaaactctacctcgaactcttcttctggggaaatatattctggattttctagcaaaaatgcaaacccattttctgatatatcaatcgtttttgaagaaagaacataagagttttgctttaacttaaaatcaatttcagcaatataacgctcagactttcttaactgttgtctccctgatataaataatgtagccataacaaggttaaaaaggtttccaatcaaccaaaataatacaactgaatatgtcattgaactcattttaaatattgctacaaacatttttaaaattcctatgatagataagaccatgtaaataaaataaggtattccctgtaaaaacttatacattctattttcttctaatttattcttatttgttactgaaaatttatttttagatattgcaaacgtttcaagtattactgctggcattaaagactgaaacattatagtttcatatatattggtccatctagtatttcttatattttgagaaaatattttaagagataaactacttaaaatatacattggcaaccaaaataccaatacttgaagtaatgtacattttactacaatcacattaaacacagaaaataaaataggtgccattatatatacaaagcgttttatacttgcataccaataagtaattgaagaaatataacttattttctgccaaaaacctaaacctctcctaaacaaaatatttagacgtctaccagtttgtatacatccacgtgcccatctttcacgttgcttaataagactttttaaatctgtaggagataaacctgatgcatgtacttctggaatagcataacatctataccccttactttgaattaagatacctgttgcaaaatcttctgtaatagaataagtataaaatccatcaacttcttcaagtgcttcccttgaaataactgtattactaccaccataaattacagaatttgtcctatttctagccaattgaatatctctgtaaaaataatcttgctcatttggaatccttccctcagagtgcagattaaattggaacaagtctggattataaaaactctgtggagtttgcacaaaaccaaccttttcatactcctctttttctccatcttttttagcttgctcatttttcaaaaagtatggtactgtagcaattaaaaagtcatgcattggtatcatatctgcatcaaacgtagcaatcaaaggagagtttgtatgttgcattgcattatttaaattcccagcttttgctccttctctttcagttctagttatgtaatttacacccattttttctgctagaatacgcatttcttcacgatttccatcatcacatatgtatatatgtacctttttcttatctggatactgcatatgaatacatccatttacagtttttctcaccaaatcaacagactcattatatgttgcaatgaatacatctacatgtggataaagttcttcacttatgactggtttttcaggatactcaatatttgacataccataataatgtacaaacatttccatcatacccattatctctacaaaaagaagtattatagcacagattaaggcaaacatcccttcttctttaggtactgtgtaaaaaattctccacaatatatatacgatattagtaataatagttaaagttataagtatcttttttgaatttttcttcataaaatcacctcttttctattaatgcacttaatatgtctctatcccaagtcccttcaatttgattgtatataccaaatccagaagcaagctcccaataagcccatgaaaagtttcgtttttcagcttcttctcttacagcttttatccaagctcttcttgaagcttctggtgcttcttttgttactccaaattcacccaagaatatttttaccttatttttatttgcccaattttctacaatatcaaaccttttttttaaataatccatttgttcatttgttccttcccaagtaatattgctcaagtgctcaaatccattatgataaatgtttccttgaaatgcaaaatcatttggttcgtaatagtgaaaagaaactactatattagaatcttttggaacatttaattcattcaaataatcaatttgatagaaattatatggtcccactataatagttcttttagggttagtttttctaattatctttattgcttcttcaatgtattcgtttagtaattgtgaagataaattttctttaggttcatttaataattcaaataccaattttttatcatatttttgatacctattagctatctgttgccatatttttaaaaactcttctttatgaactcttggttctttcataatttcttcaaaatgatgtaaatccaacacaactattaagtctttatccaatgcataatctacatatttatcaatctttttaaaaaattcttcatcaattttaaaattatcagaatctgacgtataatcagaaaaccttactggtatacgtactgtgtcaaaacctgcatcttttatatcatcaaaaaacttatttgacatttttacatcccacggaaaatccttaggtgattctagtgcattacctatatttatccctcgttgcatcttaactgtatcactgttacctcttattgcaagataaaatccaataaaagctatacttaaaaaaaacattataataatacctattctttttatattaatccccccaaacaatgttatcttccatataatattattcaatccctattatagcaaattaaagtacatcatgttacatataattattgtcatttataaactttatagcgtttatagttagttttaaaacattgaatacaactaaaaaactaaagggctatcttagaatataagtaatcctatttttcattgttgaaacaatgaaactatattgatttcatacaaaaagagtgcctcatgaactaaaaagttcattttgagacactcttatatttttttatactctgtctaacaactctaatacatattttttaactttatcatatccccaattatcaagtgaatatcctaattctatgtcaccaaaacctttaatttcagcattttcttttttatttaataattcttgcataagctcaacttctatatactctctgcccttttctttttctaacattgtaaataactcaaagtcctgtattccaaatcttaaattctccattctgacacttctaactggctttaaatcttttccaggataaacaaagaacatatctccagctttccaaatagggaatttgtaacttgaatctttccaagggtcttctgtccataaattatagtcccatcttaaaaatccatcaagaccaaagtaataagtataccatcctattattctattttctacaaaaggagaacttaaaaaactatttggtttctctggaaaacagcatacaaaccaagtcaatatcccacccttgtcattgatttttttcttaagattttctatatctttataattttgtatagtaagttttaaatttattgacatatcatcaatttcatctttagctctatctaaaaagttttggtcgtgagttgctgatttatatttaacttgatgagtacctacagtagaatttataaattctatacactctttgactacttctggattatttggttcatcagctataatccttactctatcccataatccacactctattaaatgatttaatactaatcctatatattcttttaaatcatttgtattgtttataaatttaaatactttatcattttcatcaaaatatcttactcttatagggtccttataaccttctacaggatttccaaactcaccagcacaccaattacctaatagaccaaataaatctatctccttagacattttatacttatcagctatgcttatatacctatccatactctcaaagttacatttaatctttccatccaatccttttgatacacttaccatgttatattcatataggtttgatggatttttataaactttataacaactttgccctgcccatggataatctgaaactataactgttgcaactttttctcctaaagatgctaattcttttaaatagttatcgactatttcaaaatgtatatcagaccataactcaactttatacattctagctaaacaacttggatgttgccataaatctaaaaagaacttgcttttatctaaaggctttagcacgacatttcttacttttacaggaacatcaattgtacaaactttttcttcatcttcatatccaaagcttttaaatatatcaatacctatattaaggttattttcttcaaaatcttctggtacttgaccttcaatccaaaatgtttgaggcaaatattgctctactaacacatctttatcccttaaaatagcatcattcacaaatgcctttgtatcatcttgaacatatcctaatatatttatactaaaattattttctaaactattaggcacatttaatgctaatcttactctattttccagtcctttccatgatatagtactgcttttatcaattgtacaattaaattcttctgttgcttttagcataatttgaaatgcaaatttttcacctttagctactacaatatccaaatccttctctttccaagtttcagcttctataactgagtatttattgtgtttgaatgtgcaatctttcagtacatatgaaatttccatagtttaaattcctccatatttatataagtttcttttatgttattaaattagactatttaaccttttataccagacaaagacacaccttcaacaaatttactttgtaaaatcaaatagaaaataaatggaggtaaaaatgttattgtagcccctgccatcatctgtccataattagttatctggaatgtcttaagagtagataatccaactgttaatgttctcattgcatctttagttgtagctataagaggccacataaactcgttccatgctcccataaaagtaaatattgctagtgtaattaatgctggtttgattaaaggcaatactatttgtattaaaattctaaaatccgagcaaccatctatctttgctgattctaataactcttttggtactcctaaaatagcttgtctcattataaatacgccaaatgcagttggtattggcataataagtgcaagataactatttatccatcctaagtgtttcattattatatatagtggtatcattgtaacttgggaaggtataattaaagtcattatcataaataaaaataacttatcactacctttaaaatccatcttcgcaaaagaatatcctgctaatgtactaaatactaaatttaataatacacctgaaaaagatactattgctgtattaaaaaaatattgtgcaaatccttttttagtaaagatatctatatagttttgaagagttactgttgaaaaagatatatccaaactatatgagttatatgttatcttcaatgatattatcaacatgtatataaaaggtaccaaacttgcacacgctataaataaaagtaaaccatcacttaataatcttcttgctgttttcatattatacctacctttctaaaaatctgaattgtctcgttttacaagcttattttgtaaaatcgaaactactgctattaacaaaaataatacgtttgctacagtcattgcatatccagaattaaagtttttaaagtttaagttaaatgcatgcataactatactcatagtagatatacctggacctccacctgtcacagtataaattaagtcaaatacttgtaatgaccatatcgaccctaaaaatacaaccattattgtagttggtttcaataaaggtacagttatttttataaattcttgaagttttgtagccccatcaaccttcgctacttcatagcagtgttttggtaaattcattatagctgaaatataaattaccatgaaataccctatatttttccacatagatataaacataagtgtaggtaatgctgtcttactatctcctaaaagtttagatgattctattccaaaggcacctaatacctgatatataatagaaccttctccattcaataaagccctccataccatacctatcaaaaccatagatgataatactggtataaatatagcacctttagcaaatgaagctattttactatttccttttcctgtaatccaaactgccaaaatcaatgataatatagtttggcaaggtactacaacaacagtaaatttaatagtatttataatagatacttttaatgtttcatctgtaaataattttttataattttctaaacctataaaagtggctggactaataatattatactttgtaaaactaaagtatattgacattattattggtatcacataaaacgccactaaaattattcccaatggcaatatatacatatatggtttaatatttaattttgttttttttctttttgaattttcttcaaactctctaactaagttttccattttatcctctccaatataaatattagcattgtatttataaatacaatgctaattttaatctgtaaagtcctttacaacatattacagctttaaacttttattgtgctaataaatcatttgaatattttgcagcatcatctaatgcttgttttggagttttatctcctgaaatcatagtttgaagttctttccataaatattcatatatttcaactccatgaggtcctactactaatggtctatatacatttttgtcattttccaccatttctttgaatctttcatcaccttgatatggttcaccttttgttattggtgctcttggtattgctttatgaaattctgtcattgattcaacacttaacatatgttgtattaacttgtatgcaagttctttatttttagcagatgacattaaagataaatggtctactgctccaaaagttgctgctttcttatcttctagtccagttacaaacccccaatttaaatccgggaatgattcatcaaatacacttgttgcagcagaagataacattattgtaaatgctgctttccctggtccaaatacgctttctatcatttcattactatctttagataaagaatcttcaggcacatatgcttgtaattcttttaagaaattagctgcttctaaaccactcttatcattaaatttaaccgattttaaatcatcattaaaaatatctccaccagcttgccataaataaggataccagttccagtttaagttaccaaaagttttagctccccatccctgagctaatccccattggtctatctttccatcaccatcagtatcttgtgttgcttttttacaaattcttttaaaatcttcccatgtcttaggaggtttctctcctaatttctctaaaatatccttgttatagtataatacccctggatttgctgcttggaatggcataccatacattccacccatcatttcagatgtttttatataaatagattgctctttatcctctttagttgcatagttagtcaaatcttctactgctccactttctataaactgtggatacatttctgcatacatatatcctacatctggaccttcgccagcacttatagctgttgcaaatttttcagaataattatcccaaggaattatctgtaaatctacttcacagttatttttttcctcaaatttatctaaaatagggtcccaaacttccttcatattattttctactggtggcatccaaagaactagtttttctttttcgccatccttttttgaatcttttccatttccacttgaacaccctgttataagtgttgtagtcataattgctaccatagctagtgaacataatttttttaacatacccacttttattccctccattttattttcttttttcatttttattttcttttttcattataattctacacattttcactccatttaaaatattatcaaagcatgtatttattgtctaatcagttttttctatgtacttttttttaatatagtttttttctatgacaacgtttctaatatttataattgataccttccaatttattttctccaatttaaaatttaattacgcatctttttaatctacaataataaaaagctgtagatttttacctacagcttttaaatgatagcatttattatatattattaatattctttgttgataaacttcaaagttcattaacatatttttttaaccttaatattcataatgaattacacttttatattcatcaaaaatcttcttatttaactcatctccaccatcaatattggcactatagaaaatcggaggattctttagccctttattaactaattcctgagtagcttgagctataatagagttcatcacagtagttgctattacagtagaagttggactaactttttggtttaatccatctatctctacacaggcatctcccttttgaccatgattatctatcactaaatcgcatacttcataaagtttttttcctgaagaatgtcttgaagatacactttttgagtaacttaaattagttatacatattactattgccttattttccttagctttcatagcaaactctatacttactggatttctaccagatactgaatgaactataactacatctccttttttaattggagttttatcagctagagctgtaccatatccttctaatctttccatcttacttgtgtgagttataggcgctgtatctaacattagagattttgcaaatactggatttataagaacacagccacctgctctatagaataattcttctgttaatattcctgcatgtgaagctccaaatgaaaatatagcatttttactttctattgcttcaacaaggatttgtactgctttttccatattgactttttcttcgttttctattatatcaattaatcttcttatctcatctatgtatttaaatttcatatctataatattcctccaaatagtgaacctataaacttactaattataccaaataatgaaaggtcgttacctccaaatattagtatccaattttgaatagttcctgagtaaattacagcagatattcctactaaaactaccataaatattgcagctatagctgtacctattatagctccacgtataccaccttgtgattctcctattactgctgctgctccacactcaaagaatgaagttataacaagtggtataagtagcaaattaaatacattaaagtagttacatattaaaatcatagctgtagatgttagcatagcaactaagaatcctattaatacagcatttggtttataattaaataatattggacagtcaaaagcaggtagtgcatttggcacaactttttcagatataccttgaaatgctggcattatttgatttattagcattcttaccccatgaagcattattataagacctgctccaaaagaaagaccttgctttattgcatacgttccaataaactcattactatctttaaacgcacctggtattactatcccaacaactataaacattaaaaacactgccattccaccacttatagatatttctctaaaaaatgataaactttgaggtatgtttatatcttctgtagatttttctttatttcctactaatttagcaacaaatcctgatataagtgctaaacaaccagatggatgacctaatgtaaaagaatcatctcctataacatcaaacacatattttcttaataaccaaggcattattgaccaatagagtgctgataatactgctgcaaaagctattaatactccaccatttaatccagcttcaactcctgaagctacaaatatgaatgggaaccaataaagcatgtgacctgttaagaagattgtcttaataggagtaaatcttgctatcattaggtgaatagctaaacccgcaaacattgctaaacctataattccaccataacttgcagtaaaagtaacatcacttaaaccttttgttactgcaccaccacttatactttggaaagctccattaattggtgctattgaactaactaacatacctgttccagtctccataattataattccgaaagctgcaagtagtgacccctttataacatcagatgctttctttttctgtagtacaagaccaaatgctgctattaatccaattaacatagatggattacgtaaaatattatttgaaataaaatcaagcattatattttttagtgataggtcaactgtttaagttttctaccactaaatccctcctctctttcttactatttttgaatttagtaagtttttattttattctgattaacttaaatttactttttaaaacttatactatttcttatcatttttatcacttaaaaaagtttgaacaacttctgtgacttctgctaaatccatgtactttttaactggatatacatctacattacaagttccttttaattcatttaacaattcttgacttgtgaatatacagtcacaatcagcacctctagctgaatttatatctgtattttctacttcacattctatacctaactgctttagagccttttgtattgtcatttttaataccattgatgaacctacaccaaaaccacatactgctaatatcttcatttttcattcctcctaattttgcttatttataagttctagtattgaacttttatcaccattaattattagttttacattttcttcctcgtacatcatctctgatagtgatgctaatgctctaatgtgagtagtgttatctacagcagctaataccataaatatatttactggttttcctaataaatcaacttcatcttctactattagtaaagacatagcaagcttgtttactccttctttagaacttgcatgtggtagagcaaatctatcagctaaaacaatatatggtccatatttttcaactgactttatcatattttctatatataactcttctatagagttatcttctaacaatggctttgaggctatttttattgcttctttccaatctctaacactttttattatattgaccctttctgcattaattaattcctttaacattggttgatacatctctccttcatctatcttgtgtattatgtttaataaatcagcttttagtgcttcttcattattgataactccattttttcttatagcttgtattattaattcaagattgaaatacttctcgttttcttttacacttattagtttgttcataagtaattgaacatctgatgatgttaaaagaggatttacaacaattacattgtttacattttgtatatctatagttgtaattatgtaatcgtagtatacatttacttcttttagttgcttaatggacactatacctactatttctatggttggtatgtatttatatagttgtatttccaaactctttgataccataagaccattaggacaaactagtaagactttatttcttcttaggccattatccctagaccctcttaaataccctccaaaatacgctgctataaatcctatctcttcttctcttatcccctcaaatacaggaaactcttcttcattttctataattgattttataattttataaagtgactcatgtttatacttagtctcatctaacattggatttctaataggaaacttaaatcgtattctgttgtaagaagagtggaggtgccttaaaatatttttcttaaactcatgcttactttctaattttattgctgtatttacttcaaacttatctataagtttatctacatattcttcaacaacatcttccttaacttcactatttaagctaggaagtgaacttatgtaagtgcatatataggcttgttcattttcattggcttcttcacataaaagttctttacaattactaaagtaactaatttttttagcttcatttagatatttatatgagtataatgttttcccatctcttatccttttatttagaaattccacaaacttagttagatttaataaagaataatcagtaagttttatatgtccttttgtatcgaaactacttacttccttacttatagaattaatttccagtacattttcttgaacaattatcagaaacagctctctaataacgtattcatcacctataattttgtactttcccttatactctaatcttaaccccattgtttgaaggtatttttttacatcagttattgtttgtactactgtgttttttgaaagtaacatttcatttgttagtttttctattgatattttttcgccaagtaatatcttgtttaatataaaagtttttctgtaatcactatctaaaaatttatcttcttcagttgaaattattttccttgcatcacataaattaccttcaaatataaatttgtgttttacattttttatattaccactttttcctagttgttcatttatagctagaatatcgtaataaatagttctctttgaaacattaaacctttcttgtagttcttgtgatgttacattgttatttttaataataaaatctaatatttttttagccctttccttcatactacctccttaattttattatctatattttctacatgtagtgccataccaaataattgcacatgatttagtattattttataattttgcacagtctaaccctaatctaaaagaagacagtggtaaaattattaaaaaaatttgaaaataacctatattatttatacaaataaataagttgatttcaacaaataaaagattaagctacattataatatcaaaataagatataagtaatctaaaaagcacaattatataacaaaaaattgctatattaaaagagagctatcacacatcaattggaattttttgtgtgatagctccatttttatttatttaaaatttattttttaggtctaagttcagctttatctctttttacttcttctaatatttctcttaaattatactcaacactagaaagcacatcctctgcatattcaattgacccaattcttatctcattggctattctctcagctctatcaactatatcttttgctctttggtctgcttgaacaacaggttcgctggattctacatatgcctttactacatcttcagaatttttctttaattcctctatattatcttgatattcttgttgtattctctcagcttcttttttcgcttgttcaactatatttgtagcatcttgcttagcttgacttattattttatttctttctttattaatccatactgcctgtgttacttcttctggtattaaagttcttatatcattaattattgctaaaacctcatctttatccactgtgcatttatgtgagaaagggattgtagaagcacttctaaatatctcctctaactgctcaaatagttcaatcatttctaaatctatcttcatatatcaattacccccactagtttttttctttaattcttccaaaacaatctttggaaccaaattttttatatcagcatcaaagagcaaaacctcttttattaaagatgaacttataaatgaatattttgtacaacttggtaaaattatagtctctatatctggattaagctctctattcatatgtgccatctgaagttcataatcaacatcagcaccacttctcacacctctaactaatgctccaatcccattttcctgacagtaatttattaataaaccatcaaaagtcacaacttttatattatttaaatggcttgtacttttttctataagttttactctttcatcaaagctaaatagaccctttttattaggattatttaatactcctatttgtaattcgtcaaataacttcgaagccctgcaaataatatctaaatgtccattagtaattgggtcaaaacttcctgcaaatatagcttttctaggtttattttccatattatgcctccatcttataaaaagttaatgtagtatttccatatttcttatctctagttttctccaatttacatatcttatctggaaataaatcattcgtatcatgttctacaactattattccatcttcgttcaatagattagaattatcaattttttcaatagcttctataaacatatttttataatacggagggtccataaaaattatgtcaaatttactattttgtaatttaagtttatctattgcagtcttaaaatcaaggtttaaaataatactttcactttcaactcttgccttttttacattggacttaacaatatctatgctttccttactgatatctacaaaagtacatgacttggcacccctagataagcactctattcctaaagaaccagtcccagcaaataaatccagaacttcactttccattatatatgaatttatcatattaaatagagactcttttactctatctgtagttggccttacatcttcattttttggagtatttagttttaatcctctcgcttttcctgaaattactctcaatatgacaatctcccttcagcacattattacattagtaatattttaacataatttaaaattaatttaatgaaatttctttcaatgtatctttaaatttatctataatttcttttttgagtgccatgttttctttcaattgtagattattatcttcacccaatatatatcgagcttcttgttgtgctaacttcaatatttttatatgtttaaataagtttgctactttaagttctggaagaccatgttgccttgtcccaaaaaattctccaggtcctcttatttctaaatccttctctgaaatcttaaaaccatcattggtctcttccattatagccattctttgtctacatacatctgttttagaatcataaattagtacacaatacgatttatgactacctcttccaactcgccctctaagctgatgtaattgtgcaagtccaaatctttctgcattttctattatcattaatgttgcatttgggacattgacaccaacttctataactgttgttgaaactaaaatatctatttctttatttttaaaacgttccattacttcgtctttttcactcgatttcattttaccatgaagcaatccaagccttaaatcgtggaaatattcagctcttaattcctctacaagttcaactgctgatttagcttctatagcttcactttcttctaccaaaggacatacaatgtacacttgtcttcctgattcaacctctcttcttacaaggttattatatgctctatctcgcttacttttttcaatagcaattgtttctattggctgtcttcctggaggaagttcatctataatagaaatatctaaatctccatagagtataagtgctaaagttcttggtattggtgttgctgtcattactaatatatcaggatttgctcctttcaatgaaagtttgctcctttgcataacaccaaatctatgctgttcatctgttataactaaaccaatattattaaattcaaccttatcttcaattagtgcatgtgtacctattaatatatcaatctcattattccttatttgttccaatactgtatccttttgtttttttgtaagactacctattaatagacctacatttattccaaaatcttttagagactcagtaagtgaaatgtaatgttgccctgctaatatctctgtaggtgccatcaaagcgccctgataaccatttaaaacacaatttgcaagtgctaagagagctactactgttttaccactccctacatcaccttgtaccaatctattcattattttctctaaattcatatcttgtataatttcatctaatgccctgttttgagctttagtcagtttaaatggtaaagcacttattattttttttaagtctttacttgtttcaaactttattccatcttctttatttctgccacttttaaatacaaacaaccctagttgtagtataagtaattcttcaaatacaattctatataaagctatttttaatgattccttactacttggtgaatgtatgtttctaactgcaaaatctatactacatagcctatatttttctataattctttgtggcatatattcttgtataattaattctttatcttcaagtactgttctaattatactcataatttctttatttgtaacaccgtatgtaagctggtacacaggcataaatctacatgtattcttaggtgaattagtaagatattctaattcacatgatgtaagttctaagttattaaattttttcttaaccttcccaaaaactaatattgaatctcctggacgaaaagtattttttatataacttttattaaaaaacactaatttagccgagcctgtctcatcttttacatcaatctttgttaaagtcataccttcttttgggctaaatgtatttatacttgatattactgcttttatcgtaactttctcaccatcttctaattgtgctattttctttagattatttctatcttcaaattgtcttggaaaataatacaataggtcttttagtgtaaatatacccagtttatttaatttatctgcttttttaggtcctattcccttaacatattgaacatctttatataaatccaacaaatatatcacctactacacaaaaatcctgtacaaccaattttataaaagctacttggtcatacaggttcttataatcattattcaactgaaattaagtaataataaagaggttgtcctccataatataactctacatctacatcttcaaacttttcttctaaagaagtacgtagttcatttgcttgagattctgtaacatcttcaccaaagaataatgttattatagcagtatcttcatcaaccaacttttcaataaggtttgatgttacttcatccacataatctcctgctgataataaatttccttctgcaattccaattatattaccttctttaacatcaatttcattcatcactgtatccctaacagcaaaagttacttgacctgatttaactgagtttaaagcattcatcatagcttctttattttcatcttcgcttaattctccattaaaagttactaatgcagcaaatccttgaggcgtattttttgtaggtataactattatatttttatcactcaattcttttgcctgattagcagccattattatattgctgttatttgggaaaataaatatatttttagcatttatatgctttatagcattcataaaatcttcagtacttggattcatagtttgaccaccttctattatatggtcaactccgaaatctttaaatatatttgccaaaccttcacccatagaagtagctataaacccaaactctttctcttcttctaaaggttcactatcattttctttcttttcttctacatccagtaatgtattttcatgttgtaacttcatattttctatttttatagttaataattgaccgtactttagagcttcttgaagtacatttcctgggtcattagtgtgtacatgtacctttatgactccatcatctccaactactgctagactatcaccataagccatcattatgtctcttattttagtatcttctaccttagaactttctaaaataaattctgtacaatagcaatattttatatcatctgtgctagtagtactctttgcaaaatccatacttgttgaaatattagtatctaggtcaacattttttatttctatgttatcgccttttatagaagctaacattccttcatatataagtacaagaccctttccaccagagtcaactacaccagcttcttttagattctttagaaggtctggagttctttctaatgaagaatttgattccttcacaagcatacttaaaaactttactacatctttctcttttttcgcagtttttattgcaaactctccactttctctaactacagtaagtatagttccttcaattggttttattacagctttatatgctgtgtctgaaccatttttaaaagcttttgctaaatcttctgttgataatttactttttccttctatagatttagctatacctctgattatttgtgaaagtataactcctgagtttcctctagctcccattaaagaacctttagataatgcttttccgatatctgatatattatcattttcaacttttgctaattcttttaaggcataagatattgttaatgacatattagttcctgtatctccatctggtacagggaatacatttaacttgtcaactaactctttattgttttggagattgtttgcacctgaaataaacatctcccttaaccttttaccatctatatattgaatcatttgtttcctcctatgaaattacttaactcttattccttgtacattaatatcaattctagtaactcttacgccagtcattttttcaactacatactttactctatctattatattattggcaacagtagatatatttgtaccatattgtattataacataaagttcgattgctatggcatcttcttctacttcctcaactcttacacctttagttgcgttctcgccttttaatagctctactattcctttagacttatatgctaaacctactaagccataactttccattgcagctctatatacgacttgagctattacttgattatctatttctatatttccatattgattcgttacctttgcactcatggttgacccccttaagcttatttttattaaaaacatttcttaatttattttttactatttttacttatttattatataaaattataatcatatcatactataaatatggtataatttaaacctagaaaagtttttggataaaatttcttctatagtatatatattcaaagaaaaataataattattttccaaatatatttactttatataaaattatatatataattttatatgataataagaaattcttcaatatgtgtaaggcaaatatatatttctattgcaaatttttgttatttatgataatataaatatgtttttagtctttaaatagttatcattttaaggaggtgtgcgtagatggcaaaagtatgtagcgtatgtgataaaggtaaggtttctggaaaccaagtatcacactcaaataaacataataaaagaacatggtcagctaacttaagaagcgtaagagcgattatagatggagctcctaagagagtaaaagtttgtactagatgtttacgttctggtaaaattgaaagagcttagtaaccacgtttaaaagcctacttccgtaagtaggctttttaatttaatcatttttactctttctcataaattttaggattatacttgaaatccattttggtaattttattgttactactttcatcaatactcaccccacactttatagttaaaactattttaacaaaaaaataataatgctccacatccaataagtattaatgcggtaagtgctgaccaaatccagccaggaagcaacattgacagaattacagccattcctgttgctagacaaagtattcctagcaataccttagacttgttatttctcatggaacacctccacatagaacctgtatctataaatattttcatattcaagtttatgcgacagttttccattttagaccaataaacacattatgtaattttaatttttcatactagaattattactgaactccgatatagattctacaatatccaaaattcctttttttctacttaacctttcaggtccactatataaaaccactggtataactttaggaagtttaaaatttttatcttctatttcttcaaggctttttttcataataaaacttttccaaatttgttctctatacgatttcaatcttgggacaatttcagtatccatttctgtttgaaattctaacactatataatgtgatactttgccacttttagaaaataccttataaattatatcaacttcttttcctttatattcacatataaaagatgtttctaactctatatttttaagagttaattcttttgctattgagacacttgtaaaattttgaatcaaacttaaaaaactttctttatctgaatacattcttctgtactcttctcgtttttcattgcttctttttaaattcatacagttcctcctaggctatagaccttctatattttagtaaagatagtctataaattttattttttaattttcattagtgagtattgacagttgtgtgtaaaatatccagtaaagatatttttttatatttttattaaaagatataaatttttatattttaatatattgacatttacgttgcgtaaaagtgtatatttaatttataggaggtattacttatggaatatacagttcaaaaattaagtaaactagctggtataagtactagaacacttagatattatgatgaaataggtcttcttaagccacttaaaataaattcttcaggttatcgtatatatggtcaaaatgaagttaataaacttcaacaaatacttttttatagagaattaggaattaacttagaaaatataaaaaacattataaattcaccaaacttcgatagtttaagtgcgttaaaagaacaccataataaattactagccaaaagaaagcaaattgatttactaatagaaaatgtaactaaaactatagctctgaaggagggaaaatacactatgacagatatagaaaaatttgaaggttttaaagaaaagatgattgatgaaaatgaaaaaaattatggaactgaaattagagagaaatatggtaaagatattatagatacatcaaataaaaagcttaaaaatatgtctaagcaagattatgaaaattggcaaaacctaaatatcgaaataattagtaaacttaaaaaagcttttaaaactggtgatgcctctagtgaactggctcaggaagttgcaaaattacatcataaatggttgagttacacttggaacacatactctaaagaagctcattcctctctagcacagatgtatgtatatgatgaacgttttacatcatattatgatagagaacaacctggattagctaagtttttaagggatgctatagtaatatatacaagagataaataatataaaataataaaggtggtgtctcaaaatgaactttttagttcatgagacactcttttttgtatgaaatcaaatatatttttatcattttatcaatgaaaaacaagtttctctctctattttgagacagaatctttattgtataataattataatcaatacaaaataataacaaattatacaaaacttacttatactatttatgctaaaaacaaaaaatattttattaaagtttttaaaacttatgtaatataaaaatctatactatagacttgattatggaaagaaaattatcaaaatcattacaattagatatactatctctaatatcattgtcatgaattatctttaaaaggatatcataaatggagtttatttttatataatcatctttatttatagctaacatcatgattaatttaacagtagaatcttcactccaatatattggttcattcaatatggaaatacaaatcttagttcttatagagcttaattccataggatgaggtatagctaaaaaatcatctatattggtagaagataaactttctctgtaaaatacagattcagcaaatgatggaaatacaatttcactttgagttaatttgttgcacatcaactttataagctcatctttatctttgattttaggattaacaataaataaatttttatcaaagaaattgtccaaaagattactataaatatgggaattattagtgattgacttagatatattctctatatctttttttaatagttttaaatccactaatacaataggaatactatcatgatttaaaggaattgtcgatattattatatctacatctgacaattcactagctaaaaattgattaaatgatagacattgaagtatatttattttatcatgaaaaactttgtttaattgaacctctaataacctacttgaaccataccctgaaccacatactaatactacgtttttacacttaatattattttgaaaaaatctctctattccagcacctatatgcagggatacatatccaatttcatcttctgttaaagagtaaatactatttttaaaaactttttctatagcatttaaagttatttcaaatgctaaaggataattactctttattgtatttataaggggattcaccttatttaaattataagatttagaattgagaattgatttaaagtgcagtactaaatcatcaaataatacactatcatttctaaggtcaaaagtatattgattgttgattacttctaaaatttcttcaacatactctataattttagtatccaccctattggaaacgttatccaaaagagaacttttagttataaaatgattatatagataaactctgtctgcctttgaaataattatagtatatttactctcaatataattaaatatattttcaacagttgtattcgattgaaaatctgttaaaacaacatctaaaacattatctaagcagtaaccatcaagtattctacttatagtaatagctaaatggataataaagttttttagattaaaatctagaaaatttatattaaatttattaatttcacttaacactaccctttgaagctctattaaatctacattattaaataattctatttctctatctgtaattccaattatatagttttcaaaattcctatttatcatattattagaaatacatcttcgaatatctatttccttcccttcaactttaactccataatatggcttagaaactaatattaaattatactttgacaaaataggctttattctttttatgtcatttagtattgtaaatttactcacatacaagctattagctaaatcttctagttttatatatgtattgttatagagaatatattttaaaatatattgatttctttctataggagaatctggtatttcacttgaatccataatatcatcagatattaatgctagatactgttggtataatgctaaattaagaatatctatataatatccttctcctttttttattttaataatagcaccatttttctctaaagttccatttatagaagtaatatcatttcttatagttctctcactcacttttaaatgattacttaaagttttacaagtaattttatcatcactttcatttaataatttaaacaacgtgagcaatctcttgtgcataaatatccccccttatagaatttcttctaaattatactatttacactcatataatacaattactctaataaaattgtattataataatttctttccacttctatatggaaattagttattatcataatataaatttccatgtcgaagtggaaattagttatatttaatttaattaggataatgattacaatataaatataagttaagacattacgaatggagtggaaaaatatatggtactacaagaaaaatatatatttatagataaagacttaaaaagcaaagaagaagtattaaattttattgcagatagtgcttatatactaggtattgcaactaataaagaggctcttttaaaagaccttctaaaaagagaaaatgaatttccaacaggaataaaagatggatttgcgatacctcatacaaaaagtgtaaatgtaaaggaagcttccatactctatattaaaacaactaacgagttagagtggaaaactttagatgatagtaaggttagatatgtatttagtttgttagccccacataaaaatgaaggaaatatacatttaaaaactctatctaaattagccacatgtttaatggaggatgattttacaagtgaagttaaaaatgctagtgatgcaagtcatttagtaaaatatataactaataaaatgaaggaggaataattatgaaaatagtagcaataacatcatgtatagcaggattagcacacacacctatggcagcaaaagctttagaacaagctgcatcaaaaatgggtcatgaaatcaaagtagaacaacaaggtgctatgggacgagtaaatactataacaaaagaagaagcacaagatgcggactttatacttatagcatctgaccaaactatatctggaatggaaagatttgatggtaaaaaagtgataaaagtcaaaataggtatagcgttaaaaaaaccagaagctgtcttaacaaagtgtatagaagctatttcttaataaaaaaatctcactctaatatagaatgagaaaaataaaaaattaaaaaattgtctaatgtaattataacatattatcaaaaaatataacaaacttatataggaggattaaaaatgagtaaaaaaaataaatctcttttaagtgaacttaagggacacttaatgacaggtatctcatatatgttgccacttgtaataggctcatctttagttgtagctatcccaaagcttacagctttagcaatgggtataacaagtttagatgcttataaaaatgtatctggtttttatcatattctttacttaatggaacaagttggttggactggcataggtctattaaatacggtattagcaggatttatagcattttcaataggtgagaaaccagctatgggtgcaggttttattggtgggctcatagcaagtaatactaatgcaggattcttaggagcagtaatagcaggtttctttgctgggtatgtttgtaagtttttaaagaaaaaaattaaaatatctgggtcagcatcaggaatgatgccacttataataatgccacttataacagttggattaactggttttttaatgagtgttgtattagcaggacctttaggaaacataaatacttcattaaatgcttgggtagctgaaatgtgtcaaaatggaacaaattcggtggtattggctttaattttaggcgcaatgataggattcgatttaggtggaccagtaaataaagcagcttggatggcaggaaatgcattattgttagagggaatctatctaccagcgatattggtaaactgcgcaatagttatacctccactaggatatggtttagctacattcataagaaaatcaaaattttccaatgcattagctgaaacaggaaaaggcaatatagttatgggtataattggaataacagaaggtgcaattcctttcactttaacaaatccattaaaattagttcctgttaatatgataggatgcgctttgggtgtaggattatcagctttgttaggtgtacatgctataatgcctccagttggtggattatatggatttatatcaataggttctggatgggcttacttagtaggtgcaatatttggagctttagtaatagcaatattatcaacaactttagtagacttcaatgaagatgaaactacggaaaatacagaatttgatgaaatagagttagatataatgtaaattaaaaacttaattttagataattgagaattgagtgtactctcaattctcaattaaattttgggaggatttttatgaaaaagacaaaagtacatgtagttccacacagtcattgggatagagaatggtattttacaacatcaaggtcaaaaatatatttaatgaaagattttcaagatatattagacatattggaagaaaaagaggactttaaatactttactatggatgcacaagcttctctcttagatgattatttaaaatggagacctcaggatgaatatagaataagagatttagttcaaagaagaagattagttattggaccttggtatactcaaacagaccaattggttatatcaggagaatctataattagaaacctttactatggaatagatagatgcaatgaatttggtgaacctatgagggttggatatgtaccagattcttttgggcaatcagctcaaatgccacaaatatacagaggttttggaatagatagttcattattttggcgtggagtttctgatgatatggtagatacaacagagtttatatggaaaggttctgatggttcaaaagtattagcagttcaaataccatttggttattactatggaggtaatataccagaagatgattcagatttaaaagaatatttaaaagatataattggaaaacttaaggttaaagcttctactaataacgtatattttccaaatggatttgaccaagcaccaataagaaaaaaccttcctgatatattaaaaaaagctaatgaaatagataatgaaaatgaatacgaaataagtaatatagaaaactatatagattcagtaaaaaatgaaagaaatgaatttacagagcttaaaggtgaatttttaaatgctaaacatatgagaatacacaaatccatattctcctcaaggtcagaccttaaaataatgaataacaaattagaaaattatatcacaaatgtacttgaaccattattaacattaagttattcacttggaaatgaataccctcatctagttataaaagatatatggaaacttatgtttgaaaatgcagctcatgacagcataggttcttgtaatagtgacacagcaaatgaggatgtatacacaagatacaaacaagccagagatttgagtataaatttattagatttgcatatgagacttataagtactcaaatcaaaaataataatgaagaaataacattaacagtattcaatggattcccagaagtcagaaatgaagttgtagaatttgacacttatattccaggtcaagattttgtgataaagaataaaaatggagaaattcttaattatataataaaagaaaaagaagatattacaaattatatattaactcaaacaataagattaaacccaagtaaaaaaatatatatacccaaaactgtatatagagcaaaaattgcactttcagtaaaagatataccaccaatgggatatactcaactagtttttgaattggatactaaaaataaatgtgaaatagaaacaagtaattgcaaagaaatagaaaacaaatattacaaaataacagccaataaaaatggttcattagaaatattagataaagaatctagtaagacttataaaaaccaagctgtaattgaagacaatggagatgatggagattcatacaactattctcctccaagaaaagatatttatgtttcatctttagattctgtatcttcagtagaagtgctaaaatcaaatattcaagaagaaatgatacttaaatattcattgaccataccagcttcactggaagaaaggtctataggtaaagtttctgtgaaaatgccagtaacaatgaaaattaccttagaacctaaagaacaaataattaagtttaatgttaatataaaaaataaccaagcactatctcatagagtaagagttttatttaatacagaaatagcatctaagttttctatagcagatcaacaatttggaataatacaaagaccaacagtattagaaaaagaccttgcattatggaaaagagacaattactcatggcaagaaaaacctataactatcgaaccaatgcaaagttttgttactttagaggatggacaaagaggaatagcattaataactggttgtgtaagagaatatcaaatagttggtgataatttagatacaatagcattaacactattcaggtcatttggatatatgggaagagaaaatttactttatagaccaggaagagcttctggagaaaaaataatagcaacaccagatgcacaattacttaaagagttaaactttgactttggtctttacatatataacaataaatttgatgaagcaaatgtagctaatacagctaagagattcttaacacctatacaaatatatgaatatgctgattttttaaatggtagacttctatttgcattcaatgacgaaaaacaaatatatgaaaatgaatttagtttgatgaatgtaaataattcaaatttcacagtaagtgcaataaagaaagaagaaaaaggagatggaattgtagttagaatcttcaatggtatgaaaaatgaggatgctaagggaagtcttaacatcaataaaaatgtcaatgatgcttatagtgcaatgctcgacgaaatctatgataataatagcaagcttaaagtaaatactaaaactgtagaggtaaattctttatcacattgtaaagtacaaacaatagtaattaaataatataaaatagcttatacaagatttcaaaataaattgctagtactatgttaatagtaaacccagatattatgctatttataagctctgtaacactaaataacattttgtaaaataaaaaggtgaaccttgtatattaggattcaccttttttaaataaatcaacattctgttttaaaataacatttataagctgttttgaaataatacttacaaattattttaaaacaatacctataaatttttatttaaagaatacacataaatatttccagactcttttattctatagactttataattattaaagaagtctaatctaatttttgttaaaagtaattgtaactttaaataaatcaccatccacacttatattcatcttaccaccctgtaattctataaaactttttgctattgctaaaccaagaccagaaccttctgtgttacgtgatttatctcctcttacaaatctctccattatatcatctacactaaaatcaatctcagatgcagacatatttttaagcataatatttactttattatctgtttctaaaatatcaatatacactcttgaatttggcattgcatatttgcttatatttattataagattttcaaatactctaaatgtacgctgactatctaatggtaatattattttttcattagaaaagttattctttactattagagatgaatctgcaagtttgtcatctaattctaaaagtgtctgcttcattagagatacaatatccacatttactatattcaaataaacatctccactatttgccttgcttacttcaaacaaatcttctattagatgttgcaatctttgtgactttctgtctaatgtatcaatatacaacttacgattttcatctgttatactttcatcttttaataaatctatataagtgattatagatgttagaggtgtttttaagtcatgtgatacatttgatataagctctgttttcatcttttgactcttaacctcttcgtcaacagcttttttaaatccagtttgaatatttcctaattcgtcttttataggattaaaaaatcctaaatctttttccatatttacatctaagtttccatctgaaattttctttgtaacatctaaaagttgattatattcatatattgtctttttagagtaatctgacagtatcttaaataatactactgaatatattaatgcgagtattattccaaagaaccacatactacacattataactataatcaataaatttattcccaaaattgtaactatagttttatttggcttttcttttagatttattgttctaatttgattaataactgtttttcctgctttttttaaccatacaaaaaacattcctgtcacagtatgttttgtaaaatactctcttattccaacatttaaaatatgttttaaaagtattataaatacaaatattattgagaatattacaaaccaataagttaaattcattaaacttaccaatatgctagccattttagcacttatgtcattgtttataaggtactctacataattcccactcaaggtattacttattataacagtaggatataaatctacaagcccctgtataatagcaagagcaataaagagtatctctaacggtattcttaataatgtatcaaatcctagcaactctttagattttctatatgggaatgctaaagctacaataacaactatagctaatataatttttaaaatcattccagaaatcttataataagaattattttctacattgcttatatatgaaattataccatcatcaaaataagtatttccataaccatactctacactatcacctttacttattactttaggtacagcatatactaatgttatattttttattggagataacttatatgaaattgaatttcctcctaaacttgtatccattaaatcttctcttgctttagataacaacatttgattaataactttttgatttactccataagaatccacaatatttacttttccatctttatcaaaattcattacaacgtagaatctatagttttcctttatatctgtaatctgcttttgtctttcctcatcattcatttctgtattttttgactgattttcatcagaattttcttttgaagcatcattctttgttgtatcaagtactcctaattctttattatcattaaaaaattcaaaattgctttctttatcaactaaatagtactttaaattctttcctgacgctttaatgaaatgctcccaattttcaaagttttcattaaaatctgcattaatactatcatctgtataataagtttctgaaccatcataagtatctttttctttacttacattttttatatagttcatagtttcttcattgataaatagctttgatggttgtatcatcttaccttcttgttcttccttcatattatgatataaaacataacttcctttatatatactatctacaaagctttcctgttcaaatggattctttgctccacctttagcacctgcttgtatagtagaatattgactaatcatacctaatgatgctgataacataagtataaaaactataatagtaactatatatttatctttaaattttttcaattttgtatccaacaccccacaccacctttaaatatttaggattttttgggtcaatttctatcttttcccttatattcctcacatgtaccataactgtatctgtatttatagcattttcattccaaactctttcatatatttcatcagcagaaaaaactcttcctgcatttctcataagtaaacttagtattttaaattctataggagttgtttttatatattttccatcaatattaacttcttttgtattttcatttaattctaatccgcctattgcaaacacactatcatcactttctaccttttgctctttatttccaaccatgtttagatacttagtgtaccttctaagttgtgaattaactctagccaatagttctaatggcttaaaaggttttgttacataatcgtctgctcctatattaagccccattattttgtcaacttcttctgattttgcagatagcattattactggaaaattatagttttctctaagcctcattgtaagtgttataccatccattttaggcatcattatatcaactatagctaaatgtatttcttggttttctataaccttaagaccttctaatccattgtatcccttaaaaacattatatccttgatttaatagatatatctctatagcatctgcgatctccttttcatcttctaccaccaaaatattatatgaattcattttaatctcctttatattaatttataaattttctttacatatatgattatacaatatgatagaagtttttccatttatatatatatttatatcttttgttctggttatttgtatttaatgtccatcttagaaacctccttctagtttaaacttaatattttttcattttgttttatatacttaatattaaaattaaaaacttaagatattacatatacttttctaaagattttctaaagatttaaatatatttagaattaatatataaaaaaaagtagttcttattgtattaattaaatcaatgatttgaaatataaaattaatatcaataaaacctactttttaattttttaaatatttatttttaatttatcttgtttttaatttactttgattttaaaatgtccttgacttttattttataaatgtacatatttcttctactggttttttagatggactcttcaaattgtcctctggcactccaagagctaacattgcacctaaaaaatactctcccttttcaaaaccagtttctgcttctaaaacagcttctatctcatctgctgcatagttttgacttgtcaaccaacaagaaccatatccaagttcaattgctgatagtgtaaagttttcaattgaagcacctagactctgcatacctggatttcttataaataatttatctatagtctccttaggtgcatctataagctctaattcataatatcctgatggattatatacctttgtaaaaactaatactaaaactggagcttttaagtaaaatagtgtaaagtttttaacaaattttctaaatctattagccttatccactgatactttatccatttccacaagtatttcttgttgctttttagttatcacatctgctatcttttccattaaatcacggcgttttataacaacaaaatgccagttttgaatattcttgcctgatggtgctgcacctgctgcttttatcatttttaaaatatcttcatctgatacatcttgatttttaaactttcttacactttgtcttttaaaaatagtatcttgtaattccatttttaaatccccccataacttttttattattttaatataatttttaaactcatcttattttaatatatcatgttctaacaaatctttaaatgaatctataaaataatcatatacatctacattcccaaacccatatttggcatatataaaaggtatacctacaaacttagcactatttgcatcaccttgcgtatcaccaacatagattggatttattaatttatttctttcaattataagtttattattttctcctttatgcaaaccagtattaccaggacattcaaaatctataaaatactgttctagtttatgtgcttttaaaaaagattctatatatccagcttgacaattacttactataaataatttatattttttagatagtaatttaagagtatcttctatatcatcaaataatttagctccattttcagataaatagtcacattctttcaaagaacattcattcaataaattcattctttcttcttcacttaaatttggaaataaacgatttgctatttcctcaaaagaaagccccataagacttctaaataaatcttttgtgacacttaattctatttccttatgtttacttaaaacatcctgccagactttgcatacttcttcagttgaatcccacaatgttccatctaaatcaaaaataatactatctaccacaaaaaatcccccttatgtcaaagtttattatatatttataattatatactaaaaagcagatacaatcataaatatattttacttgattgtatctgctctacaatataaaaccaattgtcaaaatcaaattttataaatttctaactacaagtacacagccttgctctactttaatcttacaagaattactcaacataacatttgatattccaataggtacagagtatttcatataataattatcgagagggtattctaagccagtaagtgttacacccttagcatcaccttttatagctgttacagaaacagtgtcccctgggtttccatacaatgaaatttcctcattttcaactatatacatctcttctttatcagaaagtatcctagaatatataccatcttcttttaaataatataatagctttatatttgcaagagtgtggtcaatccttccccctaaagcaccaaaaaaatcaatatgatttgctttaagtgtcttagctaaaaaaagacaaagctctgtatcagtctcatcttttttagatggaaatttttcaaatttaacacctttatttttatagaagtttatcttttcttcttctactgaatctaaatctcctaatatataatctggcattatttccattttataagtgtgatttgcccctccatctgcacatattatgcagtcataacattccttaattataatatctcttgtaacttcgtaatcttcaatttcgccatttaaaacaatacagattttcattattaaatttaaactaattcttcaagagaagcattctttctaaataaattaactgtttcttgaatgtcatcacttccaaatattgcagaacctgctactattacattagctcctgcttgtacaacttcggctacgtttttagggcttataccaccatcaacttctatatcaatgtttaatccttgactatctataatagcttttaactctttaatcttatctaaaacacaaggaataaatgattgtcctccaaatccagggttaacagacattaataataccatatctaaatcaggtagtacatgtttaatcgtatctactggtgtagctggattaagtactacaccagcttttattccatgtgattttatattttgtatagttctatgtagatgaacacaagcctcctggtgaacagttattatatcacatcctgcttttacaaattcttcaatatactggtctggattttctatcataagatgagcatcaaataccatatttatattttctttctttaaacttttgactacaagtggtcctaatgtaatgtttggtacaaagtgtccatccattacatcgatatgaagatattcacatcctgcactttctacttttcttacatcttctaataattttgcaaaatctgctgataatattgatggtgctaatttaatcatttttctaatacctcctactattattttgtcttatttcatgtagcagctgtatataactatcatatctttctttagatatttctccatttgtaacagcttcttttatagcacaattaggttcattttcatgaatacactttgaaccaaacttacaatcattaaatttatcaaattctataaaataatctttaagttcaacttcctctatatcttcaagtgcaagggaactaaaacctggtgtatctgcaaccattccaccaaattccaattttaaaagttcagcgtgacgagtagtatgttttcccctttttattttatcacttaccactcctgtttgaagtttaaaattttcatctatttcatttaataagcttgattttccaactccagatggtcctgcaaacactactacattttcttttaattcttcttttactttatctatatttaacttagtaatattgcttacaggaatgactttatagccactaagttcatatatatttttaacagtttctaatgtatcattatcatctaaatctgcttttgtaaggattattacagtttctaaattttctttttctgccaaaactataaatctatctaaaagagataagtttggtttaggattttttattgcgaatactattaatgctttatctacatttgcaataggaggtcttataagttctgtatctctactgtcgatttcttctaagataccctttttttcatcttcatcaacaatgcttattttgactctatcaccaaccaaaggtgttattttctgctttctaaatatccctctagccttacattcataaataccattataagtatctacataataaaatccactaatcccctttataatttttccttctagcatcaaatgcctccctttataaaatttatataaacacatactgtttatgaatagtatatcgtgttattctttcctatttttatataataccacattttttttaaataacaaatcctccgtttggactaattacctgaccagtgataaaatttgatttgtctgatgccaagaaaatagcacaatttgctatatcttctggagttcctagcctcattagaggggtttcttccacaagagcgtctatatcttcctcattatatccagataacatgtcagtattaatgacacctggagctatgctatttactctaatatttgatggtcctacttctttagctaatgcctttgtcatacctattatacctgcttttgttatagaataatgcacttcacaagacgcacctgatataccccagattgaagatatattaattatatttccttttttttctgatatcatgtattttaaagcaacttgcgaacaataaaagcttccttttaaattaatattcatcatattatcccaatcttcatcggttatatctgtaaacaacttatcttgacttacaccagcattgtttacaagtacatccaatcctccaaattcttttatacaataatctaccatattctctacatcttctctatttgaaatatcagccttaaaaagttttacagaaaaatttttttcatttaatatagtatacaactctttagcttcattttctgacttattaaaatttactaatacattgtaaccttcttttgcaaaagctttagacatagctttaccaatccctctagctcctcctgtaattaaaacggttttcttcttcataaatacttttctccttatattataaccaattcagtattttatacaaaacaaactgccctttaaagaaaatattttctataaaaggacagctcttattttattaatatttattctgttttaccaatgtttgcgccagttcctgatgaagttcctccattatctcctgagtttgagcctcctgaactatctccattgtctcctgagtttgaacctcctgaacttcctccattatctcctgagtttgaacctcctgaacttcctccattatctcctgagtttgagcctcctgagcttcctccactatttcctgagtttgaacctcctgagttacctccattattgcctgagtttcctccactatttcctgagtttgaacttcctgaatttccaccactgttccctgagtttgaaccaggttctgttggtgtattattctctggtgttgttggttttttatctggtactgttggagtctgtgtatttgatttttctgaacctttgcttacatataggtttacctcatcaccttcctgagctcttgatgagccagcacctggactctgacttaaaactgtaccttctttatatattgagctatattcatacttaacagttcccacttttaagttattttcttcaataagttgttttgcattactcaaagtaagtcccaccacattaggaacagatgcctgacttgaacctttacttacgacaacatttatagtatcaccctttttgacatttgtacttccaccttcaggtgtctgtgatattatacaattttcatcaacttcactattatactcttcactttttacactcaggtataatccttctttttcaacagcactttgagcttcttctaatgtcatatttacaagattaggaacagtcaaagatttattgccaaaccctccagcaaataaaaacttatatgctaagaatacttgagcacacaatatcagtatcaaaacagccgcaattacttttaatcttcttctagattttgggctttcctgttttttcttctttttcttagttctcttacttggagtactcttaggtctctgattctttttagctctcattatctcttcctcttcttcttcttcttcttcatcttcttcataaaaatcatcatagtaatcttcatcatcatccaaatcagctacttcaacaggcttaaccactttttcaggagctggttttgcaagtgttggatttacaactttattaatttctttttcatcaattttcttagttgcaaaatcatcatattcttttataaaatctaaatcaatatttttttctatatactctatatcttctatcaattcttcagcagtttgatatctatctgcgctagatttttctgtaagcttttttattgtagttcttacactttgaggaatcctaactttttcttctgatgtaaagtctatatcatcattaatgtgttgaagtgctatagaaattggactatctcccctaaatggaacttttcctatcaacatttcatataaaactatacctagagaatacaggtcagcattattagttacaaatttacctttagcttgctctggtgaaaaataatgcactgaacctattatactaccaatattagtcattgttgaatttgaaacagctttggctataccaaaatcagccacttttactactcttccttcatttgatatgagaatattatgaggttttatatctctatgtataatcccctttttgtgcgctgcactaagtgccatagctatttgttttgttatatctaatgcagtatattcatctaatataccttcatcttgtataatctcttttagattcttcccatctacaaactccattacaatgtagtgaacttttccatcttcaccaacatcataaacatttactatatttggatgtgaaagacttgctactgcttctgcctctcttttaaactttgttagaaattcatcatcatctacaaattcaggtctaagtactttaagtgcaacagtcctgtttaataatctgtctttagcctcatatacaaaggccattcctccatcaccaatcttcctgatgatttcatatcgatttcctaaaattgtatctcccacaatatcaccgtcctaattatacttttatcactataaccgaaacattatctttaccagaaacatcattggccatacttatcaattcttcacttatattactagttctctcatattcataatctaatattaaatctcttatatcttcatcatcaataaacccagttaatccatctgtcgcaagaagtattatatcactttttttgatttctttcttaaaaatatctacaacaaccatatcatctgttccaattgctctagttattctatttctctgtggatgtcttcttgcctcttcttctgtaatgacatgggccatcataagttcttcaaccacggaatggtctatagttattttatcaaatttttcatctgttaacaaataacatctgctatctccaacatttgccacatataagacattattatacactatagccgtaactaatgtagttcccattccttcaaattctatatcttccatagattttttgtgcacaattgagtttacattattataagcctgttttaatatatcatctatatagtctatttttacattatcatgttgtaataagttttcctttagaaaatcaattatattttctactgctaatttactggcgacttcaccttttttatgtccacccattccatcagctatggcaaatattcctattggaccatgttctgtatctataacttctccctcacaatagtcttcattgttttttcttatttttcctatatgggaggcacaactataaaccatacgacttcctccttacaaattacttgtattttcttctcaattgaccacaagctccactaatatcagaacccatagacatcctaactgtggcaggtatattgttcttctccaaactatccctaaatttataaataaatgctttatctggcttttcgtattctctttcttcaactttatttattggaattaaatttacatgacatagcataccttttaggagcttagctaatgcctttgcttctttttctgagtcatttactccttttataagagaatattcaaatgtaacccttctatttgtcttttttatataatatctacatgcattcaatatttcttcaatagaataagcatttgctacaggcataatttttcttcgttcttcatcatatggtgaatgaagtgataaagctaaatttatagctatttctaagtctgccaactcatacattttaggtactattccacaagttgaaagagttatatgtctataccctatattaagaccatttttttcgttaattatttttaagaattgttttgtattttcaaagttatcaagtggctcaccactccccatcaatacaagatttgataccctcttaccagtatcttcttgaattttaataacttggtctaaaatttcccatggctctaagtttctaattaatccatccattgtagatgcacaaaaattacatcccatcctacaacctacttggttagaaacacagacagtaactctactatcataatccatcatcacagtttctattatatttccatcatctaataaaaacaaatatttttttgtattatctaccttagattctaactttaattctatatctatattccctatacatgaaacctcttctaatttatttctcaaactttttggtatattgttcatatcatcaaaagtttttgcacccttatatatccaagagaatatttgacttcctctaaagggcttttcatctatagttttcataaattctttaagttcatcttcagtaaaattttttaatactatctttttcttttccattctctcactaccttattctctttaattttgctatgaaaaaaccatctataccatgaatattaggatatatctttaaatatcctttatcttgattgtctaagtctacatttactgtatcaattggaacaaattcaaagttgtgattttcttcaacaaaagaagtaactatatttatattctccacatcttgaattgtacatgtactatatactaaagttccaccaactttgacatatttagatgcattttctaaaattttcttttgtatagaagtgatgtcttttaactcttcttctttcttatacttaatttctggtttacgtcttattataccaaaaccagagcaaggaacatctgctaaaacataatcaaatttacttatactattttcatcaatctcagaagcatcaaatctttctacaaacacatttttaagccccaatctatttacagtagagtttataagctttagtttatgctcaaaaatatctctagctactacttgacccgtattgttcattaaagtagctaagtgagtagatttccctccaggagcactacatacatccaaaacaaatgaaccttcttttggattaattactttccctactatcatagaacttatatcttgaattgtaaataaaccagccttaaataattcatttttttctatatttttcattttttcgactttaatagcttcttctaccataggaacttttaaacatacaatacccatttcacttaatttttcaataagttcttctctacttattttaagtgtattcgttcttatatagatactaggcttttcattatttgcttccaacaaatcttcagcaaattcttgtccaaatttatctatccagttttttataatccaagagttataggaatactttatagataagtattttacactatcttcctcagttatgtccattatagtctctttagctcttatttcatttctaagaatagcatttatgaaaccagaagattttttatcatatttcttagataattttacagtttcattaactgctgcataatctgatatactatctaaaaataaaatctgatatgttcccattcttaaaaagattttaacataagttgacattttttttacctttatttttgaaagtttattgattatataatctaaataatatttattttctattactccataaattaactctgttgcaagtcctctatccatatcacttatttctaaatttttaaaatgcttatttattgcaatatttgaataattgtcatttttttctatatcacataatactttaaatccaacttctcttgcatccatataaatttctcccttttattaaacataaaaaagggttgtttctaaacaacccactttacttttagtcatttcttctttgagctattagtaacaatctaagtaattgaagtattgaaaccaatgctgctgcaacatatgttaaagctgctgctgaaagtactcttctactttgtcttgactcactttcatctataatacctaaattcccaagttgaacgattgctctacttgaagcattaaattctacaggcaatgttattatttggaataacactgaagccgaaaacaatagtataccaatttttaaaaatggaccagccataataaatcctaaaaatattaaaaaccaagatatacttgaagcaaaattcactactggtactaaactacttcttatttgaagaggcgcataacctttagcatgttgtatggcatgaccacactcatgtgcagctactgcaacagaagttatagatgttccataatatacatcttctgacaaccttacagcctttcttcttgggtcataatggtcacttagatgccctctaaccatttctatctttacatcatacaaaccatttgaatcaagtactcttcttgctgtttgctctccagtatatcctcgacgtgtatttactcttaaatacttatttgttgttgaactcactttaaattgtgcatatatagtaagtaatatagctggaattaatacaaccattgttgggtcaaatccccaaaaaccgccatatacagggtacataaataacactctcctaaaatatatttttattatacatcctcttaatattcacttaacttaaaaacagtttaattacaaattaatatattttttcctgttaaaaagtctatagctttttcaatatccatcatgtctacattagtatttacacaaggtccattaggtcttttgttaaatacacctaaaacaggaattttcttaatatcttgtattccagatgtcaaatctctttcacatgcaacagctacaacagctttaggtttattatccattataatttttctagctagggttcctcctgtagctacaaatatttttacattagttttttcctttagcttaattaattctcctacgttgcatcttccacattctttacaattatctatatcattagtaacttttaatttacaactattctcttgaatacaatgaggtattaaaattattatatcctctggattaaaattatatttattactgtatatatattcattatttaactttatatatattcttctaatatcactttttgacataccaaatgatgatgcaatgaaagatataataggaaataatccactgacaatattaaaatttattttcattatatttgagttaacatactttcctttaattactctataagtaactgctgttgaacatagtattataagtattagtgatattattataatatttatcatcaaggagaatatttgagttaaacttattataaaaaaattaacaactcctatcaaaattcctaatattaaaatcaaaatcccaacacttgttaaatacttctttatatctgtcatacttttcacctaacccaatactaaaccagtttctatagtattcccttttatatattcaccaaccaacattctctttttattcggcatctgaatttcttcaattaaaagtacattatctatagtacttacttttatcccatctttgcttacatcaattattgtacctacatcttttgtgcttttttcatctaacactttagttttccaaactttcattatgacatcattatagatagtataagcacttggccatggatttactcctctaactaaattgtgtatttctctggcactttttgaaaaatctatgttacctaatgatttattcattattggcgcataggaaaattcttcatgattttgtacttctcttggagcatttccttcttcaattaatcttaatgtttcttttaaagtttctgctcctatattcatcattttatcatgaagttctcctgctgttatattttcatcaagatttacttctgtctttagtatcatatctccagtatctaacccttcatccatatacatagttgtaacaccagtcttttcttcaccatttattattacccaatttataggtgccgcacctctatattttggaagtaaagaaacatgaacatttatacatccaagtttaggaatctctaatatttcttttggaagtatctgtccaaaagctacaactactattacatctggatttaaagatttaattttatctataaattctttatctctagcctttactggttgatatacaggtatattattttcaattgccagttcttttactggactcatacctagttttttacctcttccttttggtttatctggttgagttacaacacccaatatttcatacttctcatctattattttttgtaaacatggaactgctatatcaggagttcccataaatactattttcatcaaatcaactcctactacttttctattttgtcaacaaataaaattccatctaagtggtctatctcatgacaaaatgctctagctaaaagttcttctccctctaactctattgtttcgccatttctatttaaagctctgacctttacataatttggtcttctaacatttccagcttctccaacaacacttaaacatccttcctcatctatttgctccccagatgtttctattatttcaggatttataagttctataagctcttctccaatatctattactactactctttttaatattccaacttgaggtgcagccagtccaacaccatctgcatcatacatagtttctgccatatcatctaataattgtattatcttttcatcaattttttcaaccttttttgatttttttcttaatactggttctcctatttgaactatttgtcttaaagccattataattcctcctaaatttataatacactgtttggattaatatctatagatacattgatattcttatcaaatatcaaatctcgttttgttatacatatatattttattataccctttaagagattaatttcaatattttcatctttaaagagtatttgccatctataattttgatttatttttgatattgaacatggatttggacctaatataaatcctaaatcatttataccccttttttctaataaataaatcaatgatgcatgcatattttttatattttttatcactaatctttcatcttcaccactaacaactacacttaacatattattaaaaggagaatatccaaatgcttttcttatttttatctcatcttcataaaaaccctcataatcatattcaatagcatgcttaatagcatagtgttcagtgtcataagtctgaagtactacttttccctctttatcagctctccctgctcttccagagacttgagttatcaattgaaatgtagtttcaaaacttttaaagtctggaaaatttaatatcatgtctgcagacaaaatacctactaaagttacattctcaaaatccagccctttacttaacatctgtgttccaataagtacatctgcttctttatctttaaatttatttagtatctcatctaaagcacctttttttgaagttgtatctttatccattctcaaagtttttatatctggaaaaatatattttaattcctcttcaattttttgagttccaactccaaatggcttaacataagtacttttacattcaggacactcttttggaatttctttctcatatccacaatagtggcatcttccagtattgcttttcttatgataagttaaagatatatcacaattttcacattgaaacacatatccacactttctacaagatacaaaatttgcataacctcttctgtttaaaaatagtatcacttgattattttcttcaatcgcataacgtatttctttttgtaatttcaaactaaatatacttctatttcctttatctaattcatctttcatgtctaccacttcaatgtttggaagaggcttatcatttgctctactttttatatttataagtttgtattctccagattttgccctataatactcttcaattgagggcgttgctgaacctaaaataagagttatattattttttaatgccataaatctagcaacttctatagcattaaattttggattcttctcagacttatatgatgactcatgacattcatcaattattattaagcctaaggaattaaaaggtgcaaataaagctgacctagctccaattaacactcttactttacctgctttgacagctttgtaaacatcatgtttttctccttcagatagtttactgtggaacactccaactaaatctccaaacctactctttagcctatctattgtttgaggagttaatgctatctcaggtactaagaatatactgtctaagccttgatttagagcaaattctattatttccatgtaaacttcagtttttccacttccagttactccatgaattaagtatggttttttatcatctacaaacatattcgactttatctcatcaactgcttcttgttgttcattgtttaattttatactttttagtacggatttgtaaatactttttggctctctataataatccttaaattctagggttattagctttttcttacttagagaatttatactttgttttgaagcatttaataaatccaataaatcatttatctctacattttcattatttttaagaaaacttaatatctctttttgtttacttcccacatttattttattttgctctatataatcgtcaatcttatcactttctaaactcaaagatatataacatactttcttttcatttttgtgatttttatattcccaacataattttataattccatttttattcattgtgtacaaagaactatttaagtttggtatatattttaacttatcaaccttaattttacctttactatcaatcactttctctactatttctctatttttatcacttaaagttgatattttttccttcaattcaatctcatttaatccacttaaactttcacctaataggactactttataattatttaatttgtatccctttggatatatcaaatttatacattctatataagtacacaaatatctatttttcatccaataaaccaactctaaatcttcttttctaaatattggattttcatctaatatatcaataatttcttttatttttattttttcatctaagctatctgtaaattgaaatacaaaggcttctgttggtttattaccttttccaaatggtactaatattctgtgcccgatttttattacatcagataaaaatacaggaatttgatatgtaaataaattatctgtatatatagtattacttctaactattacctttgcatattttttcattataaaacctctacttaaatttaatatattgttcatattttaatatactttacaagatattaaaatctcagaatttataagcaatttcaagttattaatattaactttattttaataattaactattaattatattttatactttatgacaaaataaatgctgaaaactacaatttaactgacatttgcgagtttttactcgctaaaattaaattgcagctttcagccactttagctgtgataaaatacacaaatatcatatttaaaaaaggtcttatttctcaagcaacgctttaactttatctaaaataacattggctacttcttcttttttcatcttaggatactcagtaatatttccctctacatctattatttttacaatattagtatcagctctaaaaccagcaccttctttagttaaatcatttgccacaataaaatctaaatttttcttttttatttttcctttggcatgttctataaggtcattagtttcagctgcaaatccaattagtatcttatcttcttttatttttcctatttcataagcaatatcataatttctacttagttctattgataaatcatcattcttctttttaatttttttgtcagaataagtttttggtttataatctgcaactgctgcactttgaattactattttattttcacttaaatttgatactactgcttcatacaaatcttgtgctgactctatttgaacaaattttttaagattttgtggaatagaaagatttgtaggacctgatattaatgttacatcagcacctctagctatagcttctcttgctatagaatatcccattttaccagaagacctattagttaaatatcttactgggtctatactctctacagttggaccagctgtaactatcatactttgaccttttaaatcttgctctttagtaagattagtcaaaacttcctctactattatgtctggattagctaatttgcctgttccaatatctccacatgcaagcctcccactttctggttcaataaatttatatccaaagctctttaaagtttgtatatttttttgaacaattggattttcatacatattagtattcatagctggtgctataagaacctgtgctttggttgccataacagtagttgtcaacatatcgtcagctataccatttgcaatcttgcctataacatttgcacttgctggaactattaagaataaatctgctttttttgctaatgatatatgttcaacttcccaagtttttggttcttcaaacatatcttctactacataattttgactcagcgattgaaatgcaagtggtttaacaaattctgttgctgattttgtcattataacatggatatttgcatttagtttttttaacttacttacaacatcacaagccttatatgcagctataccgccacttatgccaattacaacagttttatcttttagcatgaccttactcctcttctgaaatttgttggtgttgctcagcatgatgtctagcttcttctatctctatttcctcttctgtcaataatctatatgttatttttccacttgcaacttctttagttgctacacatacaggcttttccttagttttatttgaaacatatggttcttctccatcaattaattttcttgctctctttgaaacagtccctactaaatagtatctgttgtctattttttctagtacctcattgatagatggttttaacataattataattcctccttaaatttctctattataatatttttatatctgctaactttattcttttcagatgatattataccttctatttctttagcagatgtttttacatcttcattaaatataaaataatcataatccttaatcattttaatttcttcatatgcacagctaaatctcttctctatttcagcttctgtttctgtacctcttccaacaattctattttttaattcttcaagtgatggtggtagtacaaatataaatactccctctgggcaaacttcttttatttgttttgctccttgcatttcaatctccagtaatacatcttgtcctttttctaaacattccattattgccgcttttggagttccataaaaattatcataaatttgagcatactccaaaaactcacctttttctatcatctcttcaaacttttccttacttatgaagaaataatttactccatcaacttctccagttctgggttttcttgtagtagctgatacagaaagttttattgtatcattttctttaagtagttctttgcaaatagtaccttttcctgcacctgatggtcctgatacaactagcaataatccttttttcacaaacatttaagcattccccttctaatattgtattcttactctatattttgtatttgttctcttattttttccaattcgctttttacttctactactaaattagttatatttatatcagatgacttcgaacctatagtgttagtttctctattcatctcttgtattaagaaatctatttttctacctatagagtcgtctttaaatatagtatttttaagttgccctatatgacttttaaatctaactatttcttctgttatactgcttttatctgcatatattgcaacttcttgtgctaatctattctcatctattatacttgggtcatccagtaattcacttattctcaaattcaatttttctctataatcttctacaacactacttgaatatttttcaatctcttctatatgattttttaataaatcacatctcatggcaatatcttcagctaattttttaccttcttcacttctcatttctcttaatttgattaatgcatcttcaactgcttgattcaacattgaccacaataaatcttcatcttcttccttttcttctattttcacaatatcaggaaactttgcaacattcataacgctaatatcatctataatatcaaatttattttttatttcttttagtatgtctatatactgagatgctaatccctcatcaaaatttaagtttacatcttctttgcctaataagtcaaactttatgtataaatctactcttcctctttttacataattttttactaaatttctaactttatcctctaaaaatgaaatttttcttggaagacgtatgtttatatctgaatacttatgatttatcgttttacactctactaaaaagtaataattatcatccttgtattctcctcttccaaaaccagtcatacttatagccattaattaaacctccaaaacaccttcacatatttttactgctggacctgtcatataagagaaatctcctacatctattttaactgttccaccttgagacgttacatttacactactttctaccatattaagtaaattgcacactattgctgatgcagtcataccagtaccacaacctaaagtatatccacaacctctttcccaagtataaacatgtatattatacttatcttctacctttacaaaatttacattcgttttttcaggaaatattttattattttcaatctcttttccatatttacaaacatcatctacatctaattcatctactataactactgtatgaggaacccccatcaacatagaagtaactttaagctccctatctaaaacctttatactttcttgcacaaaacgttctttatttgtaagtacaggaacatccttagctataaaacttccttttcccatattgactcttatagagtttatttctctattggtaagatttatttttatatcttttataccatctaatgtatctactgtaaaactttcttttttaactatacaattatcataaacaaatttacaaaaacatctaaggccatttccacacatagctgctcttgaaccatcagaattataatataccatttctacatctgcaacttttgaatctttcacaactaacaatccatccgctcctacagaaaatcttctatggcatactttttttgctaaagcagtataatcagatggatttatctggtcgaatcttccatctattgctataaaatcatttcctattccatgtagtttccaaaatttcataagtatcgctccttcgtaaattaacgcttaaactattataacataaaaaaattcccataaacttataatttatgggaaaagttttgtaatgacaactataatttgaggatgtgagggagagttgtcattacaattagggtaattatattatgtttttaagctagttctttctatgtttatatattaatatttctatatgaattttatgtatgttttatttaaactgtctatgaattttttaattaaacatctggtaaccagctataatccttttagtagatatctattaacatacacctattaattctttaagtgtttttaaaacatagtctaaatcttccttagtaatatctacatgagttacaaatctatattcaccattttccattttattaatttttatatttctttcaaaaaattcttttattaaaacatcctcttttataatatcttcactcatcttaaaaaataccatacttatatctggattaacattgtttacttcaatgccatcaattttatttaattcacaagctaaatattttgcattttcatggtcttcattcaatcttaaagtcattttttcaatggcaattataccagctgctgcaactatacctacttgtctcattcccccacccataactttttgctttcttctagcttttgctataaattctttacttccagcaagtatagaacccattggtgcagctaaaccttttgacacacagaacataacactatcacaacactttgctatttctttagcttctacacccaaagttaatgctgcgttaaataatcttgctccatctaaatgtactggtaagttgtgtttctcagctatttttttaatttctcttaaattatcaagactcacaacagttccacctgaatatgcattttctacacatataagccctgtctgtggttcatgtatgtcatctcttctaattgccttttcaacaagttcaggatttagagctccactttcgtcttcatctatagttctaagctgaactccagctattacagcaggtgccccaacctcatgagttacaatgtgataacctttaccaataattatttcttgccctcttaggcaatgagtaaatagagctaattgattcccaaaagttccacttggaaggaaaatagcatcttcttttccaactttagctgctgctaattcttcaagtttatttacagtagggtcatctctaaagattgaatctccaacaggagcctttgccatagcttctctcatttcgtcagtaggcatagtaacagtatcacttcttaaatcgataaatctcattttttcaaccttctttcatatttatatactatagaaccttaaaattgattttttctgtaaagttcatatactttcatagcttatactctacacaataattatactatatttactttatatttaatctactttaaattattaattttaaaaataaagtttcctctctaataagtataaataattatacaatttaaatattaatctctatcgtttaaattccccctagtcacaaagcgtatattatgtgtataattaatttactgactcattttggtcaaagaaaggggtgctataaatggcattagatggattagttatacattcaatagtcgatgaattatcatcaaaacttacaggtggaaaaatagataagatacatcaacctgaagatgatgaggtaatttttaatataagaaataataaagaaaattttagattggttttaagtgcaagtgcctcaaatcctagagtttatcttacaagtaattatcaaaaagaaaaccctctaaaagcgcctatgttttgtatgttacttagaaaatacatacaaggtggaaatatagtagaaatttctcaaataggttttgaaagaataataaaaataagtgttgaatctttagatgaattaaaagaaaagacagttaaaaatattatgattgaaattatgggaagacatagcaacataataataactcatggtgaagaaaataaaattatagattctataaaaagagtcccttttagcataagtagagttcgtcaagttttacctggtcatgattattcattaccaccagaacaaaacaaactcaaccctcttgatgatatatctaaggatttgtttattaaaaacctagaagaattggaaggacctatctttaagtctatatattctaaatttctaggtataagccctattatagctaaagaaatttgctacagagcaggtgtaaatcaaaatgctatcataaaggatatatctgatgaacaatttgattctttacacaaagtattttgtaatttattcaatgatataaattctaacaaatactccccttgcattattatagataaaaaggtggataaggtagttgatttcagttgtataaaccttacattatttagcgatttatcatatataaataaggatagtatgtctcgtattctagaagatttctatagaactaaagatattaaagacagaattaatcaacgttcatctgatttaaagaagagtatatctgttaagcttgatagactttataataaacttaaaaaacaagaagaagaattatcagaatccgaaaatgcagacatttataagataaaaggagaattgattacttcatatatttatatggtagaaaaaggtatggaaagtattgaaattgctaacttctatgatgaaaattgtaatgatgtaacaatagaattaaataaaaacttgacaccatctgaaaatgctcaaaaatactttaaaaagtataacaaaatgaaacatgctaaagtcgagatatctcatcaaatttccttaaataaggaagaaatagattacttagaaaacatagttttaagtattgaaaactgcgaaaatttagctgaattacaagatataaaagaagaacttgctaaggttggatatatcaagactcaaaagaaaaacagtaaaaaggatactatcccatctacaaaacctcatgaatttgtgtcttctgatggatttaaaatattggttggtaaaaacaataagcaaaatgactatcttacactaagacttgctgataatgatgacttatggatgcatacaaagaatattcctggttctcatgtaataataaagtgtgctggtaaggaagtccctgataatactgtatttgaaggagctatgctagcagcattctttagtaagtcaaaactttcttctcaggtgcctgtagactatactaagagaaaaaatgtgaaaaaacctagtggttctaaaccaggtatggttatttatgaaactaacagtactatttatgttactcctgaagaagaaacagtagccaagcttaaggttaaatctgaataaattctgcactaaatacaaaataaatgttagacaagcacacattatcattctaaataaaaatagtggccttcttataaagtacaataataaggccactttctaattagcttacttttaattttctaacaaaatacttttctgttttaataactatacttatattcccaacaaatattttcagtcttcttatatagatgtaattaaaaagttaacactaaaagctattttttaatttagtgatttgttttagtaattcattatattctgattcatacaattctttttttagattatctttttctatagataacatagatataacagttgtaagtctattttctaatactagaagattctcttttttgatttgcttgtctctactaggagtttttttatttctgctaattatatattcgtcataattacaatcaaactcccttattttagcatcttttatctctataatatagttacaaatatgtgatacaaatactctatcatgagacactataagcatagttttatcagtatttatcagtgccttttccagtgcttccatagattttatatctaagtaatttgttggttcatcaaatactaaaaaattattatcttccaatattattttacatagtgctatttttaccttttctccaccactaagtacttttacttttttgtagacatcatcacctttaaacccaaataggcttaagtttatccttataaaagattcatcaaatgaactattaactttagtattgtatagaacactcttttcctcatctaataaactttgattttggtcaaaacaacctacttttaccttgttatttatttttatattgtcatttttatcagccaatatttcttttatcagagtactttttccacacccattatcacctaataatgctatctttttacctctttttatcttaaaggaaacattatctaacaagagcttattttctaactttagagtcatatcttttacctctaatagatttttgctaattatctccataccatcttgaatcttaatgttcatttctttagaaactttaggtttattctttacctcaagtttatcaattctgctttttatagccttcacatttgagtccaactttttcttattagtctgaccacccattttgtgcaacctagcttctgaattacccattctttttggtgtctttcttatgccatcacttaaagcttttttatataaaagagctttttcaagcctttttttctctttaacatattcttgatactcaaaatcagctctttttacttcttcatctttttgcattaaataatcagtgtaattgcctttgtaagcttttagttttccatcttctagttctaatatagttgtacataactcatccagaaaacgtctatcatgagatattaataataatgctccctcatgccttttaaacatatcttccaaaagcccaatgctttttttatctaagtttgaagttggctcatcagctattatgatatttttcttattactcagcgcatctgctatttttaacttaaccttttcccctcctgataagtattcttcaaatttatctggagcatttaaaagactcttctccttactatgactacatgtttcaatattattttcactctgacttatataagaatagctttctgtaaggtaagtatatccttcatcaatttctatttcacccaatattgcttttaataatgttgtttttccttgaccatttgaaccaactagacctattttgtcattttctaatatttcaagtttatctatatccaaaattaatttatctgcataatatttctttaaattctctacttttactaacaacataaaaaatccctccttaacacacttaaatataaggagagattctataaataggcataacaaataaacgtatagactataatctactctccttaatttaagcattgcaaataaagccatcaaaataggcttttcaaaaattacaatactttaaattataaaaaatagattatattctcattgtcctagttaccttgccctttctttcatttatttttaatcattatatcaacattaattacaaatgtctatagaaaattaactaattttagttattcaatatacaatttattctttaaatttattcttcttcaactttaaaatcctgattatttaaaattctgtttaatacaattccaacaattgcagctaaactaagaccagttatctttactgtacttgttatagggattccaatagaaatgcctttattagataaatatgttgttccaagacctattaataatataactgctattattaatatatttatcttactttctacacaagaactgtcccttatagtttttaatcctacataagttatcattgaaaatagcattatactaattccacccataactgaacctggtatactttgaagaaatccaccaaactttcctacacatgcaagcaatatagcaaatattgctgtacgtctaagtattgaagggtcatagtttttagttatagcaagtactgctgtattttctccataagttgtattggctggtcctcctaaacaccctgcaactatagtcgcaaatccatccccaagtaatgttctatttaatcctggattttctataaagtttttacctactacagcaccattagtagtcatatctcctatatgttccataaatacagctaatacaactggagatataatcacaattgctcctaaactgaacttaggaactgtaaagttcggtattgcaaataaacttgcttctgtaatagtagttatatctactaaccttaacagtaaacagattatatacccagaaaaaacggctattaatattcctaattgttttataaatcctctaccaaacttattggttaaaattgctattgctaaagttataaatgctattacaaaattagctgaagccatactaaaagctgttggcaataaatttaatcctataactactatcatagctcctgtaacttgtgcaggaaaatataatttaattttatttacaccaactatttttactataatcgacattataatataaattaatcctgctactattataccaccttgagcatatgctaaatctccaccatacgcctctttagctgctagtataactggtataaacgcaaaacttgaacctaaaaaggcaggtacttttccttccgtacaaaaatgaaatatcaatgtaccaacaccagcacagaaaattgcaactgacggattaaaacctgtcaaaatgggaactaatactgtcgctccaaacatggctaatagatgttgtaaagacattattgtttttttcataaaaacctccaaaattattatatataaataaatcctctgtttaattaatatcttttaattaattatcattccctagattctattttttaacctctatatacttattatataatttatcattattttacattttacgacatcaaaaactcaaataaaggagaataaaaactacattaagactcacatccataaaattataatatttattttgtgcaatctatgtaagctttatcctcctccctgactattcaatgctaagcttttatataatacttaaaactaattattctttgattgtaactgaatcttctccatcaatttctaataaactgacagatataatttcatgtctagaagtaggtacattttttcctacataatctgctcttataggcaactctctatgccctctgtccactagaactgctaattgtattgatttaggtcttcctatatctataatcgcatctagtgaagctctcacagttcttccagtgtataaaacatcatcaaccaaaactactgtcttatcatttacattaaaatctaaataagttcctttaactacaggttcaacatgaattttttccaaatcatctctatataaagttatatcaatatctcctgtatctacttttgttccttctatttgttctattttcttagaaattctatttgcaattggcacacctctagtttttattccaactaaaactagattttctacacctttatttctttcaattatttcatgacttattctagtaattgctcttgctattgccttttcatccattaattgagctttttctaccatatcataattattgtcaaagatataatatatctatttgacaaatctactcctttcttttaattttttataaatttatttttatttaaaatttcaatttaaacaacaaaaaacttctcatcacaagacaagaagctcttatataaaaaatatacagtgtaatttagcaattgtcttacgatatctctgtatcgtttaaagataattttttaatctatcaactcaaattatatatttatatttcaaatttttcaagcttttttaaacaaaatactttaatataagatattttatttaaatttcactaaatttatttacttatataaaaacaaaaaatgatttataagtattatacaaatggttattttatcttcttaatagcttccttaaaatactcaggtaattctgaattaaattcgatatattccttagtggtaggatgtataaatcccaacttcttagcgtgcaaagtttgtccttttaatttaaatttagtttcttttggaccatatacaaaatcacctaaaagtgggtgatttatagacaaagcatgaactcttatttgatgagttctaccagtttcaagcctagctctcatatgtgtaaacttatcaaatctttctacaacttcaaaatgagtaattgcattttttccatcctttactacagccatttttaatctatccttaggatttctccctataggtttatcaacagttattttatcttctttaaccacaccatagcatataaattcatactctctagttatagtatgttcctttaactgttctgctagaaaattatgtgcataattgttcttagctatcataagaagaccagaagtatctttgtctattctatgaactataccaggtctaataactccatttattgacgacaacttatctttacaatgatataaaatcccatttactagtgtattttcatagtttccaggagcgggatgaacaaccatatcctggggtttatttattattaagacatcatcatcttcatatacaatatctattggaatatcttgaggtaaaacctctaatactttaggttctggtatctctataacaatattatcttcctctttaactagatatttagctttttctactttattattgacctttacttttccatcttttataattttttgtatataacttcttgacatatcacctaattgttctgctagataaatatcaagtctaacttcttcttcctcttcaagtactaaaaactcttttacttcatccattatatcacctacttttactttcaaaaaataaaacatatatacataaaaacacagttcctacaactacaaatacatcagctacattgaatacatattcccatataactctaaagtcgaagtaatctaccacaaaacctaatcgtactctatcaattagatttcctaatgcaccagatataattaatataattcccaaccttccaaatatatgtactttccttgtattaagatagtataatccaaatactgttgcaagtaatgcaacaattataaatatccactgattattttgtaataatccaaatgctgcacctctattttcgacataagttaaatgaaatacattatttattattggtattgttgaaacatctaccaaattattcaatacccatattttagacagttggtctaagcctatgagtagaattattattaatatatatagcaatgatttttccccctataaattatttaaaaaccaattttatttgaaacacactattattattatacaaaaaaaatgctctaaagagcaactttattaaaattgtattttcttaataaagctagagcaaaatttaaaatagtaccatcttttttatattgcagattgctacatatttaaaatcatattattatgtataaaaaatttaaaaataacatactaattaatactttttgtgtgttttatagattaaagattaatgatgtctgtactttaaacttacaagcaccactaatcttcaaacaaatatttttacttttgcacttgcttatttttatctaaatgttgtataagttcagatactgttacgaatttatatcctctctcttttaatttaggaattactacttctaaagcttgtatagtttgtgatttatcatttcttttagtgttataatcatgtaaaagtattatattaccattttggacctttgtaagaatagtatttataattgtatctacaccagggttagaccaatctctagggtctaagtttgaccaaagaattatattcatgcctttagaaactataatatcacagacacttttactcatggctctatatggaggtctaaatatctttggttctactcctattacactttttataatattttgtgtatctgttatttctttttcaacactaccataactattttttgcaacatttatatgtgtaaatgtatgattccctatttcatgcccctcatcatattgcctttttaataattctttgttatattctactttttctccaactacaaaaaaagttgcttttacattatttttctttaatatatcaagtatttgtggtgtaaaatcctcatctggaccatcatcaaaagtcaatgctagaatcttttcatcctcatttcctttttttattattacatcttcataatcgtcttttatattgtcatttaaagtataggtttcttttgaactattttgattatgtgtattatggttatatgtatatacacctactatggataataaacatatacatataccccatattgctttcttcatgtcattacctcttttctaattcattctaacaatatatgatgtcaggcttctaatctctcaatgttccatttttatttaaatcagttaaatttgttaggtcttctgaataaaagttagaatcttctacatcaggattttgcattgcatcacctaataaagcattttctttttttgcacaattgttacataaatttgtatcaggtaatatatctaatctttctaaatctatttgattgtgacataaatcacaaaacccatatgttccattttctattttagataatgctgaatctatttgatacagtcttccttcttcatgatttattaaactattttgcatattttgcatatataaatccgttcccatatctccaatatgattgtcataactagataattctcctgatgaatatttttcactagtatgtttagtagtgtctccaaacaaggtattatctttcatatctacgactaaattagttaacttttctctttcttttaataatttatctttgtattttttagtatccattttcaacacctctaattttaatatttatatcataaaaatagtatgtggaaaactaaattaaaaatacaataaaaaacaagatttgattttttcaaaaaaaattgtaggtaaacttaaaattcacctacaaattctttacatatatttttaatataatgtttttagtttttgataataattacattaacttgctaatttatgagcattttgctcttttatatccttagcttttttaaaaaataaaagtccaaggattattgcaactacaatacctattccattagatatattaactggaagtctaaatccttcttttgcctgcattatataactaaatgttactacagtcataaaaagtgctggcaatgtagttatgtaatgatttttatttgctttgactaaatatgcagaaccagtccacaacattatcatagcaagtgtttgatttgcccaagagaaatatctccaaattatattaaaatctataaatgtaagggcaacccctacagcaaataatggcaaagctattaaaaatctatttttaactgcatcttgattataattcattgcatcagctattgttaatctagcacttctaaatgctgtatcccctgaagttataggacatgctacaacaccaagtatggccaaagcgcctccaataggtcccattaatccaacagatactgtatttacaacagttgctgctccaccatcattaaatattacattaagctgaggtataccatggaaatatgacatagctgctgctgcccaaactaaagctattataccttctgcaaccattgacccataaaatactggtcttgcctcactctctttctcaacacatctcgccataagtggtgattgagttgcatggaaacctgatattgctccacatgctattgttataaataagtatgggaataaaggtgttccatttggattcatattttgtaaatttatatttggtatgttatacccctttattattaatcctccagctacacctactgccataattaataatgctgctccaaataaaggatatattttaccaatcaatttatctattggtaaaacagtagccataatataataaagtattatcactccaacccatatttgtgcgtttacacctgtcaatgtctttaataatcctgctggacctgttacaaatacaactccaaccaatactaaaagaataacactaaatattctcattgctatttttgcaccatttcctagataaagacctaccaactctgatgcagatgtacctttgttcttcattgataaatatcctgaagcaaaatcgtgtactccacctgcaaagattgttccaaacacaatccacaaaaatgctgatggtccaaataacgccccttgtatagctccaaatatcggacctaaccctgctatatttagaaactgaattaaaaagattctcttccatttcattggcacataatctactccatccctacaagctatagctggagtttggtttttgtcattgattccaaaaaccttttctacaaaagtaccatagataaaataacctactataagtactactattgaacctaaaaagcttaccataaattcatccccttagtttttatataattgctttataaatttttatgagtttaagaaaactatttccagttcaaatagtaatacttttttatgctaatataaatattaattacattaagtgcatatttaagtacatgaaatgactttatatatgcattaacagcctaaattcttttactttgcttctgcttacagttacttcatagtcactattttttaatttcaatatgtatgtattgttaaaccatggtataatttcttttactttggttaaatttacgatataagacctatgtgttctaaaaaatgttttatcatttataagattctctacttctgatatgccttcttttaatataaacttttctttctcagtatatataaatgtctgcctttcattagcttcacaataatatatatcatcaatatctattacaaccaatttatcacctttccaaaggctaattttatgtgttatttcttctatctcctgatttactgtctcttttttatatttatataaattactattgctattagacagttcaatatcactcatctcacttttttctaatttattcaacatagaaataattctctcttcagaatatggcttcagtacataatcaaatacatctaaagaaaaagcatctactgcataattttcatacgctgttataaaaacaattttaggccttgatttaaactgatttaatgtttttgcaagaagcattccatcgagatgaggtatatttatatccaaaaaaattacatctattttattttcctgaataaagtctaacacttctataccattagtaaattcatttactacctctatgctacttttattctcaataaaatatcttaattcctttcttgccggaaattcatcttccactattatagctctcatacttctactcctttacataaaatactatcaaagtcccattgtctgttcttcttatattaagccctcttccatacatcagtttaagccttaaatgtacattataaagtccaatcttattttctggcatattatcttgatatacattatttataatttcctcacttatacctataccattatcctctattgatattctcacagtattttctaatgaataaggtaacttttttatggatattttcactacaccagctctaccactttctaaaataccatgtattatcgcattttccactaatggttgtataatcaaacttggaatctttatatttacatcttctatatcataagatacagttagtaattctccaaacctagctttttctatctctacaaaagatttaacttgttcaatctctttatttatatcaattaagttatcactatattcaagattatatcttagataagttgataaatttattattaactctctagccttatctggactaaatcttataaatgaagctattgtgtttagggaattaaacaaaaaatgcggattaatttgtctttgaagtgcttttatttctgctttatttctcgcttctatatcttttttatctttctcaatcccctctactatagatataacaaatcctattccaatctgtccaacaattaaaggtaaatatatcccaacaattatttgaattgctaaagaatgtggatatgatattaagtatataagtagtatagtaaaactttcagaaatcatacctaccaatataccatacattactctatgttgctttggtatcctcttatatagaaatcctgataatacacctgctagtatacttgataaaagacatggaacagatgttatccccccaatatccataaaatatctatgaatccctgaaaaaactcctgctgtaatacctaccattggaccaaataaaatgccacctgatactatagatattattctagtgtttactattgaccccatataatttataccactataagttccaaatatggctaaaaaagtaaaaactaatgctatacagaccaagtcattaaaactatattcttccttttgaaatatctgcttaaatatttttaactttgttattagaagaaacagtactacaatgaggcttgtcttttctattaatgcgattaaaattgatgttttcatattccacctttaaaaaataaatttttacacactctaaatttattatgtttgttgtaacttatatatttgaagtaatcctatctcgacattttccacatttaaccttttaattaaataaaaaatggatatacttctattaacaactaatactagctgactaacacaagcttgtaataacttgtagttatcattaactctacaattctagtatttaattttatactttagaaatctcttttcttagaagtaatactttcgaatattatataatacaatgttatgtagattcttactcatacaacatatttctttaaaaattttatactattctttgttcaaatatctcatttgatttaattgtgctaaacacacattatcatctctctgttatatatttattatatagccgtatatcgataaagtaaataaatcctatatttaaaatcatatgtttgatagtaaatcattataatgtatatttaccataataatttgccaaccttgaaagtcacttctataattagaagttaaataattcttctaaaaaaaatacctctaaattttattttctgaaatacatagttataactatttttatcacgtataagaataaaaattccagaaaatttttattatctaagttaatataaaacatattatttaatataaataaattttttataataatatattgatttaatttactttattattgtaaactataagtataagatatactatataaacaagcataaatataccttaattctaactatccttaattttatttatctcctagtgttattttacgtattttttataaaatacttttagtttttttacttttgaattttttataggagggtatttagtggatatattaatttttgataacgatgttataagattatattataatgcaaatttgttattaaaagaacttactgaaaaaaataaagtaaaaatatattttatagttgtagatgcaaaatacaagataagtaatgaattatgtgatggattatggatagcacaaaaaattagagaatcagattatattagtccaatcatatttcttacaaatcatatagaaatgattttagggatcttcgattataggttagaagttatggactttatattaaaacatgatatggaaattgctgaaagtaaaataaaagcttgtattaaaattgctcataaaagatacgttaaagaaaaaaattatcgctctaatttttttactatctactcagattcctcactatggaaaatttcatttgatgaagttatatattttgaaacaagcgctattccacataaaataaaattagtgactacttcaagaatatttgaattctataaaagtttaaggtctttatcagatttagatgcatgctttattcgtgtacataaatcttttgtagttaataaatatcatattgtttctctcgacctaaagaaaaataatattaaaatgagtaatggccatatatgtcgtatatctaatacatatagaaatattttaaagaacattattaaaacataataaatagaaaaaagagatgtctcaagataagaatttgaaccatctctttttttatacaaaaaaagtagttcctaagaatcctctatataataatcgttttgtgaaaaaacacataatgactatatcatatacaatttctattagacattgcaaccattgttcctagattatgattcaacaagatagctcattaaatcataaaagtatgaaatagtctctttaaaatattcagttgttattttgtactgacatatcatataaatacatatttttatgatatatagttacatattttatgaaatttatataaaaaattcttatttagattatataatctaaataaattaaagttcaagagttaattaaactaatattgggagggagaataaatgaaaaaatttaggaaacataaaaggattagtaattgtatatctatattgttgatattatatctaactttaggtggtttgttacctaataacatttatgcacaagacttacaaagctatagtgaaaaagtttgcaatactacttacaaggctcctatagaaagaccagaagattttcttaaagataaagaaaaggctaaagaatgggaaagaaaagaagcagaaagaatagagcaaaaacttgaaagatctgaaaaagaagcattagaatcatataaaaaagattctgtagaaataagtaaatattctcagacaagaaattatttttatgattatcaaatagaagcaaattctcgagaaaaagaatataaagaacttcgaaatgctatatcaaaaaataaaatagataaacctatgtatgtctattattttgaatctccagaaaaatttgcatttaataaagtaataagaacagaaaatcaaaacgaaatttcattagaaaaatttaatgagtttaaagaaactatacaaaacaaattatttaagcaagatggatttaaagatatttctttatatgaacctggaaaaggtgatgaaaaacctacaccattacttatgcacttaaaattacctagaaatactggtatgttaccatatacaaatactaacaatgtaagtacattaatagagcaaggatatagtataaaaatagataaaattgttcgtatagttatagatgggaagcactatattaaagcagaagcatctgttgtaagtagtcttgattttaaagatgatgtaagtaagggggattcttggggtaaagcaaattataatgattggagtaataaattaacacctaatgaacttgctgatgtaaatgattatatgcgtggaggatatactgcaattaataattatttaatatcaaatggtccagtaaataatcctaacccagaattagattctaaaatcacaaacattgaaaatgcattaaaacgtgaacctattccaactaatttaactgtatatagaagatctggtcctcaagaatttggtttaactcttacttcccctgaatatgattttaacaaactagaaaatatagatgcttttaaatcaaaatgggaaggacaagcactgtcttatccaaactttattagtactagtattggtagtgtgaatatgagtgcatttgctaaaagaaaaatagtactacgtataactatacctaaaggttctcctggagcttatctatcagctattccaggttatgcaggtgaatatgaagtgcttttaaatcatggaagcaaatttaaaatcaataaaattgattcttacaaagatggtactataacaaaattaattgttgatgcaacattgataccttaatattttttcacataaataatttaatatttttcaaatttaaggaggagaaacaatgaaaatacaaatgaggaataaaaaggtattaagttttttaacacttacagctatagttagtcaagcactagtatatcctgtatatgctcaaactagtacaagtaatcattctaataagaaaaaagaaattgtaaatgaagatatactcccaaacaatggattaatgggatattatttcacagatgagcactttaaagatttaaaattaatggcacccataaaagatggtaatttaaaatttgaagaaaagaaagtagataaacttctggataaagacaaatcagatgtaaaatctatacgatggacaggaagaataattccttctaaggatggtgaatatacattatcaactgatagagatgatgtcttaatgcaagtaaatactgagagtactatatcaaatacacttaaagttaatatgaaaaagggtaaagaatataaagttagaatagagctacaagataaaaatttaggttcaatagataatttatcatcacctaatctttattgggaattagatggtatgaagaaaattataccagaagaaaatttattcttaagagattattctaatatagaaaaagatgatccatttatcccaaataacaatttctttgacccaaagttgatgtctgattgggaagacgaagatttggatacagataatgataatataccagattcatatgaacgaaatggatatactattaaggacttaattgcagttaagtgggaagatagttttgcagaacaaggctataagaaatatgtatcaaattatttagagtcaaatactgctggagatccatatacagattatgaaaaagcttcaggttcttttgacaaggctataaagactgaagcaagagatccgttagttgcagcatatccaattgttggagtaggtatggaaaaattaattatatctacaaatgaacatgcctctactgatcaaggtaaaactgtttccagagctactactaacagtaaaactgaatctaatacagctggtgtgtctgttaatgtaggatatcaaaatggattcacagctaatgtaactacaaattattcccatacaacagataattcaactgctgttcaagatagtaatggagaatcatggaatactggattaagtataaacaaaggagaatctgcatatataaatgcaaatgttagatattacaacacaggtactgcacctatgtacaaagtgacaccaacaacaaatttagtgttagatggagatacattatcaactatcaaagcacaagaaaatcaaattggcaataatctatctcctggagatacttatcccaaaaaagggctttcacctctagctcttaacacaatggatcaatttagctctagactgattcctataaattatgatcaattaaaaaaattagatgctggaaagcaaattaaattagaaacaacacaagtaagtggaaattttggtacaaaaaatagttctggacaaatagtaacagaaggaaatagttggtcagactatataagtcaaattgacagtatttctgcatctattatattagatacagagaatgaatcttacgaaagaagagttactgctaaaaatttacaggatccagaagataaaacacctgaacttacaattggagaagcaattgaaaaagcttttggcgctactaaaaaagatggtttgttatattttaatgatataccaatagatgaaagttgtgttgaactcatatttgatgataatacagccaataagattaaagatagtttaaaaactttgtctgataaaaagatatataatgttaaacttgaaagaggaatgaatatacttataaaaacaccaacttactttactaattttgatgattataataattaccctagtacatggagtaatgtcaatactacgaatcaagatggtttacaaggctcagcaaataaattaaatggtgagacgaagattaaaatccctatgtctgagctaaaaccttataaacgttatgtttttagtggatattcaaaggatcctttaacatctaattcaataattgtaaagataaaagcaaaagaagagaaaacggattatttggtaccagaacaaggatatacaaaatttagttatgaatttgaaactactgaaaaagattcttctaatatagagataacattaattggtagtggtacaacatacttagataacttatctattacagagctaaatagtactcctgaaatacttgatgaaccagaagttaaaattccaactgaccaagaaataatggatgcacataaaatatattttgcagatttaaattttaatccaagtacaggaaatacttatataaatggtatgtattttgcaccaacacaaactaataaagaagctctcgattatatccaaaaatatagagttgaagctactttacaatattctggatttaaagatattggaactaaagataaagaaatgcgtaattatttaggagatccaaatcagcctaaaactaattatgttaatcttaggagttattttacaggtggagaaaatattatgacatacaagaaattaagaatatatgcaattactccagacgatagagagttattagttcttagtgttgattagtatcaaatgatttaaatttgtccccacaatacaatatatatttaccttataaagtactaaaaaattaactttataaggtattttttatttaaatattctcttcttctaacatattcttttttagaactatattgtattataaagataattatctgtatcatatcacctatatataaacataaattcatttaattatataaatttaaaaaatatttttttgatatattattgacaatttccattataagagttaaaattaactcataaattacatattgggtataaaatacaatgtatgttagaagttgtttcagaaggctatggttttctgatttttttatgctcagtagtgatatgcaaaaaagacaaagttgacatcagttaacttttacctttattctactttccccaaagtaagaataatctaacccctttgagatgagcaaaagctcatctttttttattatcaaaagatgctgtctcaaaatagagataatcctctttttcattgttgaagtgattaaaatatattttatttcatacaaaaaagagtgtctcatgaacaaaagttcactttgagactctctctttcatatcatatacctttttaataactttaaaatttatttatcaagtaaagatagctaataattagtatcttctctctataaatccaacttttttataaacttttctaagagtttttctagcttgtttttcggctttttctgctcccatactatatattttttctaaataatctttattattaagaaggtcaacatatttttctcttataggtcttaaagcttctgatactacttcagccacatcttctttaaatatgccataaccctttccttcatacatgtttacaatctcttctacactctttttacttaaattagaatatatatcaattagatttttaatacctggttgttcatcattgtattttacaacacctaaagaatcagtaacacttctttttatctttctctttatagaatctgaatcatctgctaatagtataaatgcattttcatttgaatcggatttactcatttttttagttggctcttgcaaactcatcactcttgctccaccttttgggtagtatccttctggaactacaaaagtaggtgaaaatctattattaaacctatttgctaaatcacgagctaattctaaatgttgtttttggtcatctccaactggaactaggtcagtttgatacaacaatatgtcagcggccataagaactggatatgtgaataaacctgcatttagatttgcttcactcttttgtgatttatctttgaattgagtcattctacttaattcacccatataagtcatagtattcaatacccacataagttcaacatgctctttgacatgtgattgtataaatatagtatttttttctgggtctaatccacaagctatatattgagcaagtaattctatagcattcgctcttaaaactttagggtcctgaggtactgttattgcatgtaaatcaactatactataatagcaatcataattatcttgaagttcagtccagttttttatagctcctaaataatttcctaaagtcattttgcctgatggctgtgctccactaaatataacttttttttcactcatttttttgtacctccttatatatttatattgattttaacatatttaaaactatgtctttagagttattggcagcatcatgtacaaatacatcataagtaacatcagcacttccatctgccttatcagacattgctcttattattacgaatggagtattatttaaatagcatacatgagctatagctccaccttccatttctccacaatatccaccaaaatcatttactaattcttcttttaattctttagaatttataaatttatctcctgtaactactcttccttttaatactttatgagtctttacttcttccacagaagatttgtaagcagcatctataagtctttcatctgctttaaatacagaagtcttcattcttggtataactcccttagggtctccaaatgctgtagtatctacatcatactgtatagcatcagttgatattactatatcattaacatcaagtttttcatttaaagctcctgcaacacctgtattaacaatagcatcaaccttaaattcgcttattagtatctgggcacaaagagcagagttaaccttacctataccacactttactaacactacattcttacctttcaaaattcccttataaaattctaagctagctttttttatagtctctctaatatccattaaatcaactaaaatactaacttcttcatccattgcacctataattcctattacgttcatttttcctcctaaattttctatattaaaaaatccgtcctaaatcaataggacggatatattttccgtggtaccacctaaatttatatacactcaaaactgaatatatatatcttaatatatgctataacgtgcatacacgatatcaaatactctgtaatcttaaattacatttcattttactcctcaaagacccattcaataaatactttttattaagttctcagcatccttaattctctgtgcaaaaatatatttatttactatttcttatctcaggatttaatttattaatttctttattttataatattccttacactataaattgtcaactatatattataatatccaaaagaaatttttaaaatacattttatttagctgttttcttttcatatctattccataaccatagaccagataatataactagaagacctccaccaatcatctctatctcatatataacattttcagcaaatgtcggcataactggtgctgcagataataatataccaactacagttacaactaaaaccatttttgctaaacctaggcaagtacttgttgattttgccatagtataaggtctaatttcatctggtctctcttttcttagtttaatataagaagcatataataatacatatgggaataatgcagttaatgctgtcatagttacaagaacattgtatatagcatcaacagaaggcattaatgtagtcaccaatagtattatagtaactattattgcttgaagtataactgctttagaaggtatcttgtgttcatttacctctaccaaactatctggaaatattccttttttaacactaccaaataacatttttattggtgatgctatataaagaactattgctcctaatactgagaaagctataccaaaagctattaattgaaccaaccaagaaccaattcctaaagacgtacaaacagcagaaagtgcatctaatacacctttagaagcagtaatttggtctggtggtattatcattgttattgcaattgaacctaatacatataatgaagctactattccagctgatattaatattgccttagggaagttcttttcaggcttatctatttctgttatgaagttagcagcagtctctgctcctgctaaaccaaacattatagctgatatagcaacaaatgcatccatattaagttttggagtcattgaagctattgtatatgtagaagctatatcatgttttttcaacataaatactgctacaaatgaaaatattataagtatagcacttggtattgttgaacctaatgcacctgtattagtaaatatttttgtaaaacttattcctttagttgctataagagataatgcccagaatattattaaagataatataagtacaaacatcttattatcagcaagagctggatttcctattgtataagaaacatttactgctaagaaagttaaaaatgaagaataccaaaatattttagctgtccagtttaaccaagaaactaaaaatccatacttttctccaaaggcttccttaacccaatcgtaaagacctccatcacccttttgatatgtagaagctaattcagcgcaaattaaagctcctggtacaaagtatataaatgagaataataaccacataggtattgcacctaatcctaaaccaaagcttgatgctgtagacttagctatccatcttataccatataaagctgatacattcataaataccaaactccataggcctatttttttcttttccatcctaatttcatttcccctctctattaattattttaaatttaatttcaaaattaataaaatagattcattattattaaactgatatttttcaaaatatttgcatattcaaaaacagttttaataataaaccttaaatactttgaaatcaaatcttattaaaaatgataaatttaaaagttttaccactttaattctaatgatactaaatttttaaaattgtttcaatattattttattataaaattttatttattatttttcattagtatataaaaagataaaatacataactttatagacttaatttattacttttatagaattttcacaataaaaagtcattttacttccgtatttaatgcaaaagtagagattaaacttaatataaaaaatatataacaaactttttttatatttctagaagaaaagtatactcttttttgtttaataatgctaaaattgatttgtattgaattttgattaggaggaaattattatgaaagctcaaagattaaatgctgtacttgaacaaatgaaaaaagatgatatttctcaaatgttagtaagtgaccctacttctatattttatcttacaggagtactaatccatccaggtgaaagattattagcattatacttaaatttaaatggcaataataaattatttataaatgaattattcccagtttcagaagatttaggtgttgaaatggtttggtttaatgatactcaaaatccagtagaaataataactgaacatatagacaaaaatgctactatgggtgttgataaaaactggccagctagattcttattaaacttaatagaattaggtggaggaagtaagtttgtaaattcatcttatataatagatactttaagaatgtgtaaagatgaagaagaaaaagagttaatgagaatagcttcaaaattaaatgacaaggctatggaacaacttaaagctactgtttctggtgaacttacagagaaacaacttgttggtaaattatctaaaatatatgaagacctaggtactgatggattttcatttgaccctattataggttttggacctaatggagctaatccacatggtgaacctggaaatgcacttgtgaaaccaggagatgcaataatattagatataggttgtataaaagataactattgtgctgatatgacaagaactgtattctataaagaaatacctgaaaaaggtagagaaatatttgaaatagttcttgaagctaataagagagctgaagctattgtaaaaccaggtgttagattctgtgatatagatgctgctgctcgtgactacataactgaaaagggatatggacagtacttcactcatagaactggtcactctataggacttgaagttcatgataaaggagatgtatcttctataaatacagatactgtacaaccaggaatgatattctctatagagccaggtatatatttaccaggtgagttcggagttagaatagaagatttagtacttgttactgaagatggttgtgagatattaaacaaacatgacaaagaaatatgtgtagttggttaattctaaaatcaatttgataaaattaaaaagccatataaaaatgttttaaacatttttatatggctttaatttctcaatctatgatttatttcaatccattatttatattgcagttattaagattgcaccctttgaagtatatgtccccatcactgaaccaatttcacagattacaacatctttgtattttacatccttttccataacttcccttaccttttgagccttttctgggcaattagcatgtcctataaataaaaccttttcttctttatctttaatttttgactctactaaagtaatcagctttttcaaactgtttccttcacctcttgccttatctataggagttacaacgccatctgcaacttgtattatcgccttaaaattcaaggtatttataatttttcctgctattggatttattctaccacccttaatagcattttctaaagtttcaagtgttccaaaaaatggaggattatctttatatttatttattattgaaacaatctcttcaatttcttttccttcttttattaatattgctgcttttaacactaattgtcctattccaattgacccactaagtgaatctataacctcaacttttttgttatttccttccttttcaaacatatcttttgctaaaagtgcactattataagtcccagataatcctgaacttatattaatcaccaatacactttcttcctgacaatggtatgcttctaaaaatttatcaggagaaggacatgatgtttttggtagtactttactctcactcatttttctatagaaagtttcattatctatttcctttccagatatataactttcttctccaaaagatacatttaaaccaacaacttctatgttgtatttttctattatatcatcaggtaagtcacatgcactgtccactatcaattttattttatccatattaacctcactataagatattattttatttattcagtcggtcgtacgaccgatttaattattattttatatattgaatgaaaaaaagtcaatagatatagattctcgctttattgacaataaatattcataagcttataatgttattaatttgttataaatatacatggaaaggtaggttttatgaaaacaaataatatgaaacaggctattttatcatctgcaaccaatttaatagccaaaaatggagttcaaaatactagccttgctgatattgcaaaagatgtaaatataagtaaaggtactttgtattatcactacgcatctaaagatgatattatatatgatattgcggatactcatttagaagttataactagtgctatactaaactgtgtaaaaaatgtcaaatcaaaaaattctcaaatagaaatggttaacttaatcttagagaaaatatctactatagaaagtcgtggtagggtacatatgtatcttatttgtgaggcaattacttcaaataatgatttaaaggaaagaataagattaaaatatattgaatggagaactactcttaaatctgaaattgttgaatcactagaaaaatataatagtagcgaaaatgaacaggatgctgaatcattttcttttttactcatgtcaatagttgatggtttagttgtccaaagtttattaaaaacagaaaaaataccttatgaaaatatagcttcttttttagttaatcattggatttaaacttaatacttagataattaataaaagtgaactatttaagttatctactttaacagttcactttcttatttattctcaataatttttacttaaaacattcaatttttatttaaaccttcatggaatcacaaaataaaaatctcttataaatttaaaatgtttttatttatgttcatgtgtatgcccatctgaatgttcatgaccatgtgtatgtgtatgctcatggctatgctcatgagtacctgaaaaaccatcatcatgattatggtcgtgacctacaccatttacatgctcatgttcatgcccatgactgtgagaatgttgatgtgaatgttcatggttatctcctccacagcatccttctcctccagtcccacaacacccacttgtatgtggattatgatgatttcttactacaaatctctctcttaacataattcttatacctcctagtatattattgaatacttcatgtaccccattaactacagtatacatctaactaggtataatctcaatacatatggcattttttaacatatataattaacatatataatcttaaagaaatttatccttaaaacctccaccttttacttcttcaacgttattgacagaaataaaagcttcactatccatatcataaattaaatctttaaatttacctatttcatttgcagatattatgcaataaatcatctttttcttattttgtgtatatgcaccttctgcctccaaaaaagtgactcctctacccattttattcattatcactttggatatttcatcatatttatttgatattaaaagtatagatttttttctatcaaagcaatcttttcctatatccatagtaaaagaaattatatacattgtaattaaagtgtacatcaccaatttagctccaaataagaaagctcctgcacatactacaaaaaaattaataaataaaaatgtatttttcataggtatatcatactttcttttcattatggctgctattatatcaagtcctccagcagtagctcttgctttaaaagttaaccccatacctataccagttaatgcaccaccataaatacactgtagcatagtatcatctattgggaaatatttagcaatatcttgtgttagccccagtgctagagaaaacagtaacatattgacaaaacttattagcaaaaatttattatcaaaatactttctagctataataaatattggtatgttcatcaagaaacttgatattccctgatttataccaaataatttgtataatataacacaaattccagctactcctccacttaataacttggctggtgctagatataaatttattcctaaggttgatagaatcatacccaatataatcagaccatattgtaaaaatatgttattctgaacctcccatgactaaagtcacagggttcctgcttcatagaattttgcatactaaaatatgtcttactaattctccacaagctatccccgtagttcctacggttcttacataagttatttattttgaattgttattagtcttaatccttcttttaatatatttatgcttgcatttatatctctatcgtgagtttcattacaactaggacaaatccattctcttatatttaaatccttaacttcctcgtttttatacccacatttattgcatatttgtgaacttgcaaagaatttacctacctttacaatttgtctaccataccaattagccttgtattctaattgacgaacaaattctgaccatgacacatcagaaattaagcgagatagtttacgatttctaatcatattctttacttgtaaatcttctatgcaaataatatcattctcttttattaatttagtagatagtttttgtagaaaatcctttctttgattggctatatgttcttgaagtctcgcaacttttaatcttgctttatttctatttaaactatcgattgtttttctcgataattctctttgtaatttagcaagtttgtttaatgacttcttaagatacttaggattttctataaagtctccacaacttgagatacaaaattctttaattcctaaatctaaacctatctgattattagtattttcaaatacttcaatatctacatcagtacagcataatgatacataatatctaccacttggttctttagatatagtagcattaagtattctaccttgaggtacttgtttatcccttatcttaaccataccaagtttaggtagttttatatattgaccacaatacataatgtttccatttgtaaagttagttttatatgaaaatctattaattttctttgatttaaatttaggaaatcctgctttttctttaaagaattttttatatgcattatctaaatcttttaaggcgttttgtagtgaaaatttgtcaggttctttaagccattttaattctttttttaaattggtcaaatcagaactacactgtttataagtaaaagtttctttatcgtttttataaacttctattcttttagcaagatacttattatatacaaatctacaacatccaaaagttttgttaattaactcttgttgttttttatttggatacattctaaacttatatgccttttccactactatcacctcactctaattgttttttgatacacattttaatgattttatcatatttaatatattatataatgctgtgatgaacaatttattaatcacctatcataatattaacaaatgtaattatttaaaacaattatttagaaggttttatatttaattttaaataacatatttaagaaccgtaagtcttaacttttatcatttttgaggttgtcgttcacataagttcgctactacctatgcagttctcttatgaacttcttacactttcacgtaagcacagactatatcttatccttcggcattatccgttaaggtctacccacttccactaccaatagcttgtagtgtacttccctcaagaggaatagtcgttgaagtttctcctattcggagtttacctgctgattgcccattttaaagtacttagggtttaaccttataccatctaaccaattttttctactttcgtaactttcacacttaggtttatttcatccttatgttttagtttggttagctttaggggtttccagcaattcaagtagtattggataggttctatcctatctctacatataggtttccctatatgctgactattttagctactaactcatgactaaattcacgagtgtgcgtagctattttttaatcaatacttaactttttgttttcaccatacatcaaaacgcacccctttgcataataaataaaccaccctgcagaacacacgataaatttataaataaatttatcagaagtagcttactaaaaatattattcatcctcacttaaacgtttattcattaatattctatcacatgacataaataatttatatgatttatatagatttatttattgtaaattttggaatattaaaacattttattgaatagataattatattacataaaaaatccctatagaaatctataaactaatttctatagggattttggttaactaactattctttttatttttttataacttttatacctgtcatatggtcatttaagttttgttcctctaaagatttatcatctactctgtttatttctaaagctaaagtttcagacttgatatattcattaaaatggtcaacagccttagcaatttcatcatcaccacagtattctattactatattatctaatacttcaaagttattagattttcttaattgctgtactttagatataaattctctagcataaccttcattaatcaactcttcagttagcttagtatctagtataacaaaaagattgttttcaacagatacattaaatccttccttagcagttatacctattaatactaaatccttattaaattcaaaagcttcgccatctaaatcaactgttaaagtctcacctttttcaagtttattagcagtttcatgagcatttaatttacttaatgctccaacgaataaattcatcttagaacctaataatggccctgcttccttaaagtttggttttaaactaaagttcatatactcatctaaatccttagcaaatattacctctttaacattaagctcttcttttattaaatcaactacatcacttattgtatcttcaaacttaccatctactaacactttttgtaatggttgacgaacttttattctttctacttctcttgaagctctacctaaagtaactaagtttttagctaaatccattttttcttctaatttagtatctactaactcttcattacatttaggatattcagctaaatgaacagatacttctcctgttaagtttctatacatttcttctgacatatatggtgcaaatggagctatagctctacaaagaccatgtaacaattcataagttgtattgtacactgcttttttatcttctgttaattcagttgcccagaatcttcttcttgaacgtcttatataccagttagataaatcatcatttataaaatcttgtatcatccttaaagttttatttaactcaaatatagctaaattttcttctacatctttcattaaattattgaacttagataatatccatctatcaagttctggtctatctttatattctacaaaaaattcagttggatttatatcatctgtgtttgcatataaagtaaagaagttatatacattcttcatagtacctataaatttactttggatttcttttaatccatccatatcaaatttagttggagtccatggtggagaaacatatagtaaataccatcttaatgcatctgctccatattggtcaaacaattccattggatttactgtatttcctcttgatttactcattttcttaccatctttatcaagtacaaggtctggaactaaaacactcttatatggtgcttttcctaatacaaatgttgatactgcaagtaatgagtagaaccaacctctagtctggtctataccttctgatatatagtcagctgggaacaattggtcaaaattttccttattttcaaatggatagtggtgttgagcaaatggcatagccccactatcaaaccaacagtctataacctctgttactcttgtcattggttttccacatttttcacattttaagtgtatatcatctacatatggtctatgaagttcaactgtttctggatttacatcttctatagctttttcagctaattcagctcttgaaccaactgaatctgtatgaccacattcacatctccatataggaagtggagttccccaatatctagttcttgatattgcccagtcatttagattttctaaccagtttccaaatctcttctctcctacaaaacttgggaaccattttacaccattattattttctattaatttatctttaagtttagtcatctctatataccagcttggttttgcatagtatactaatggagtttgacatctccagcagtgtgggtaattatgaactactttttctttgctatataatttattttcagaagctagccattttattatttcaacatctagcccatcttccattacaaatctaccttcccaaggagtagatgtaaatttaccagtttcatctactggttgaataactggtaaatcatatcttttacctgtgttgtagtcatcttcaccaaatgctggtgctgtatgaactataccagttccatcttcagtagttacataatctcctactgtaataaaaaatgcttttttgtcaacttctacaaaaggcattaattgttcatattctaaaccttctaggtctttacctttcatttcttctaaaacttcataatcttcacctagtactttatcagctaaaggtttagatacataatatacctcatcaccttttttaacttttaaataatctacatcagcatttactgttaatgaaacatttgatggtaaagtccatggagttgttgtccatgctaagaagtattcatcagcatcttttttcttaaatttagctataactgtattagtttttacttctttatatccttgtgcaacctcatgactagcaagaccagttccacatcttgggcaataaggaagtattttatgcccttcatatatatatccttctttgttgaatttgtttagtatccaccatacagactctatatagttattatctaaagttatatatggattatctaaatcaacttcataagccattctctcagtcattattctccattgtttttcaaatgagaaaactgactctctacatttttggttaaattcagctattccatattcttctatttgttgcttgctagtaagacctaactctttctctacttgtatttcaactggtaatccatgtgtatcccaaccagcttttctctttacttgataaccagacattgttttatatctacaaactgaatctttaagcgttctagataaaacatggtgtactccaggatttccattagctgttggaggtccttcatagaatacgaaacttgggtcatctttccctttttctaaagttttttcaagtatatttatgtctttccaataatcaaaaacttgtgcttctgcttgttttacagaactgtctaccaatggcttaaatttcgccatgtaaatcaccctttcctactaaatattataattccaaaattttttattctttcacataaatttaaatactaaaaaactcgccccctttaaaccaaagggacgagttataaatcgcgttaccaccctaattctatatgtaaactaaatactagctacatataacactctaatagtataacggtactaaccggcacagcttagtagaatttaatcgttcagcctgcagctcaagagtgatttttatctttataaattcattggttctcagcatacccaattctctgtaaaattatctaaagataaatgtctctatcaacgcttttaaaaatttatctgtgtttatatgaaattttataacaaataatttgaatagtcaatatatttttgaaaaatataataatttctatttttcttacatttttatcctatttttaatctttgttatagatttctcaaactcacacagttattctacataaaaaataaacaaattacaagcttattctaaagttgtagcagcttcatcattactataattatacactgttgttccttcaaatgcatttacacatttttcatctacatcataaaaaatctcatcaacacttcttatttcatcttctaacagtgatttaaatttatttctaaatatcttaaattctttgactaaagcatcatactcttttcttatctctatgacacggttattagcttgttctataatttgtctagcttttaaatcagcttcttcaacaattatcttagcctttttattagccgcgctacaagtgtcttctgctgcactttgagcagttattaaagtagcttttagtgtttcttcaatattttcatacttgtttacttggtcttgatataaccctaatttttctttaagagctgtattttccctacatagagattcataatcttccttgatgatatctaaaaattcatcaacctcttcatctctataccctcttaaaccttttttaaactctttattttctatctcaattggagttagcattacatttcctcccagctataatttaaattagtccttatacaattaatcttgcttgaacttttatttttccttttttggtaatatctcctatttgtgttaccttagctcttcctttgcctctaatagaaatcaaatcatcattttttactattttagaagttgaagttatcttttcataattgacatggactttttctccatttatgtattttgcactatcttgtctagatatattgtaaataccacttatcacacaatctaacctatctgaagatactgtaaatgatacttctttatattttgaagaactattaacaatattttctctggaaatttcctttacaattacattatttcttgaaaccttttctaagtttacaattataaaatcgcaaatatcactacttacaactacttgacaaaagctatcatgtataattatatctccaattttttctctttttatacctagacccagtattgaccctaagtaatctttatgagatatatttttaaacttgaaattcccttctatttgtaaaaatctaagagtatcttctatatcttcatattccatgtaaaatggataaataaatacagtgcttctttcagcttgttcataacctccatccacactgtattttatttcatttgtagaatttaatattgctacagcatttttcacttcatatggattaagaaactccgtagacttaacatcatagttttttatacaactattagccttgtctatcactttaaacattttatttttcaagtctatatcctttatgtgatttgttagttttaatttatccatcctatcaccttagaatataaccaatactaattgtcttaggaacatcaataatactattgcaattaaaggagaaaaatctataggtccatttgtatatttatacattatagaccttattggcccttctattggctctgtaagattttccaaaatattaaaaattttactttgtcttccatttggaaaccaagtcatcaagctttttataactatcatccatgctattatatctaaaagataataaagtgcaattcttattgttcccatatattaaccgcctttttactatttattttgccaagggaagaatgctttactttctaattcttttttcatatttgcatctatatccacattattaggagctagtataaatattgatttagaaaccttttgtatacttccatctaatacataaactgccccattcataaagttaaatatagatttacgaacttcagaattagtcaatccttccaaattcactataactgcccttctttgttttagatggtctgctatagttgcagcttcatcataaaccttaggttcaactattacaactttcatttggctagttgtatgtaaatttacaattttatttgcttttgcagtactaaagccactgttcatttcttcttcttgaactatatcgtccatgccactttcatattcatcttcaatataatcttcttcttcatcaactatccaattcttaaatttagatattattccatttgacattattaacttcctccttaaaatttattcaaatttgagtaattattttttattgtagtttctttctccaaagattgatgttccaactctaacaatggtagccccttcctctatagcaatttcataatcgtgactcattcccattgacaaaacatccatccctacattagggatgtttagttcttttatttgttttgataaatctttaagacctttaaatacacctcttatctcatcttcatcttctataaaaggtgccattgtcattagaccctttatttttatatttttatatttttctgacacttctttgacaaaatctacaacttcttctctatcaagtccatgcttagactcttctttagatatattcacttgtactaagcaatctatttctctgtttatttgttctgcacgtttttgaatttcttcgcataatgcaattctatctaaagagtgtatcatacaaactttatcgattatgtacttaactttattggtttgcaaagttcctatcaggtgccagtttaatttgtcacctataatatcatactttctagctaattcttggggtttattttcaccaacagaagtgattccttccctcattgcctcattaactaagtctacatcaacagtctttgtgactgccaaaagggtaatctctttgctgtctctatctactttttttgcagctttatcaattttgtttcttatctcagacaaattatctttaatagaacccattattatcacctactttatccttatatttgtgtttatactgttaggtcttaaaattattttgtcatatagattaacacttgtaactccatttatgtcatttttataataatccacaaatacagaagattcattctcataagttattccttctaatatgacaaattttacactttgtgattgttcatcaattacatatacaccacgtttattgtcttttgtttttatagaagttttaggtatttttaaacattccatctgattatatattatatcaaattcttcgacacttgtatcctgatttgcaacaatttggttacttatttttaattttaccattattttattattattttcatatattttgtaaacttttgcatctaatttttgctcatgatattcaattattacattttgatttttttcaaagttattagaatcttctttactgatgtatgtagatagataattactttggtcattggcatctttttctatagttccttttacaggaatctttgcatcaactttttcattttttaacaccaacgtatctacatttttgctaattatcattactaatatattaaatactaaatatataagaataccaagtatcactaatctggtatattttacctttttcaaagactctccccctataaaattactttcattataagtacttcttctaaaaaatgtttattccttttttataagctaatattttacgttctaataattattttttccatattaaatttattttttatcaatcttcctatacaagactgcattatttatatataattgtattataaagtataagtttaatttacattttatacattaagcttactttatatgtttttatagttatttttatttttagatgcaatataaaaccaattaagatttaaaataacttttgttatgttgacatttatttaggtaatcatttacgaatcgggataacgttatcataacaaaagtttatgtcctaaaaaaaatacaaggaggattttcttatgtcagaaattttattaggaacaggtttacttttattggttctatgttgtttcacaatttttagttacaaggccccatatggtatgaaggctatgggagctctagcaaacgctgcatgtgctactttcttagtagaggcattcaacctttctttacttggtgatgttttaggtatggaattttttagaagtgttggagctgctaatggtagtcttggtggagttgctgctgctatacttgtgcctttagccttaggtgtatctccagtttatgcagttttaataggattatcttgtttagatttttctatattatctggattcgttgctggatactttgtttctttcttaattaagtttatagagaaaaaagtgccacctggagtggatttagtggttgtaattcttctatgtgcaccgctatctcgtcttatagcatcaaatgtagacccattagttaatagtacactactacaaattggacaagttttgatagaagctaccaacattagccctataataatgggaattatactaggaggcataataacagtagttggaacgtctccacttagttcaatggctcttacatctataattggtcttactggtcttcctatggcaataggagcattaggtgcttttggttcagcttttatgaactcaacactatttgcaaaattgaaattaggttctaaaaaagatattatatctgttgctattgaaccattaacccaatcagacataatttcagctaatccaatacctatatattctactaatttctttggaggagccttttctggtatcattgtagccttgatgggtcttgtaaacatgacaccaggtacagctacacctgtggctggttttgctataatgtttgcttataatccagttcaacaagttcttataacagctggtttatgtgctttattcaatgtaattgcaggatttttaggttcaaaaatattcagtacctttaaagttcttactgctggtgaaatacgtggtactgatgtagaagaagaaattgcttaaaaaacaataagatttataaatttatatctcaagtagtagagttttatattgtaggcaattttattaattgcaaacgttttattttttatttatgtttatgattattatgtgtgttgaatatttagataaatttttatttattatttttatttagatttttgtttagttttttatttggttgatatattaggaataaaaattagtatagtttattattagttagatagcataactttttagatacataaaaaattttatattaattagatattattaaaataaaagcgatacatgaatttttaaatgtccatgtatcgctttatttttgccataatcttaacaactgatttttaaagtttattatcttaacgaagttcattatcttatataatatttaaatgcatagacttctttaatttaaccatctaaatatttaattaaatattattatatgtaatataactaatttttaaatgaatgtataggagctggaatccttcctcctctttgagtaaataattcagatgaatttgtacttataggcattactggtgctcgtcctaaaagtcctccaaattctaccatatcacctacatcacatcctggggctggtataattctaacggctgtagtcttattattaatcatacctattgctgcctcatcagctatcatagctccaagcgtacctgctgtagtatttcctggcacagctatcatatcaagacctacagaacaaatagcagtcattgcttcaagcttatctatacttaaagcacctttaataacagcatcaatcatacctgcatcttcagatactggtataaacgctccactaagtcctccaacatgtgaacatgccattactccaccttttttaacagcatcatttaaaagtgctaatgctgctgtagtcccatgagtaccaacaacttcaagacccatttcctctaatatatttgctactgaatcaccaatagcaggtgtaggagctagtgataagtctattatcccaaatggaacatccaatctactagaagcttcctttgccacaagttgtccaactcttgtaattttaaatgcagtctttttaactgtttctgaaacaacatcaaaaggctctccctttactttctctaaagctctcttaacaacaccagggccacttacaccaacatttataattctatcagcctcaccaacaccatggaaagctcctgccataaatggattatcttctactgcattacaaaatactactaattttgcacaaccaaaaccttttgcatcttttgttaattctgcagtttcttttatgatttctcccatttctttcactgcatccatatttataccacatcttgtagaacctacatttactgaagcacatactttattagtacttgctagagcttttggaattgacttaattagtatcttatcaccttttgtatatcccttttgaactaatgctgagaatccaccaataaaatctatacctaaatcctctgcagccttatccaatgtctgtgcaaactttacatagtcattttcatctgttgcacctgcaataatggaaattggagttactgatacccttttatttacaattgggataccaaattcacgctctatatcttttccaaccttcaccaaatctttagcagaactcataatcttattgtatattttttctctagctttatctccatcagggtctatacaatctaataaagaaatccccatagttatagttcttatatccaactgttcttcatctatcatctttattgtttcaagtatatttcctacattcactattatcacctccccttactgtctactacagattatgcattgaattaaatatttcttctcgctgaatttttacatccactgataatttcttacctctttcaaccaagtcctcaaccgttttctcaaaagaatttaatgatttctctaaatcaactatcataatcatagtaaaataatcctgtaatattttttgtgatatatctactatgttgatattttgcttgtataattcatcactaattcctgccactatacctggtttatcctttccaattactgttaaaattgctttcataataatatcctcccttatttttttataaatcttatatttttacaaattgaactatgtattaacatatatttcatttatttgttagtaaaccactttttatgtatatatttaatatattttaatacctatacattcatttgtcaattttttttcaatattccattatttttatactatttagaaaattcatattttatatatgttttctcaacaataaatacagttttcataataatgaaaggtattacttagcaatctcgtgattttctaaataatacctctctaaaaattatttttttaattttatgaatttaattatactttttctagtatcaggatttacaattaatatagaaccaatcataattggtgttagtatacaaaataaaaaaataatatctttttttagattatattctttagattctaatttataattattatttattattccatcataatcacttatatttgacttatttttatttgtatcttgatttttgttagaaatactttccctataaggaaaagaatgttcattggtaccaaatactgattttgagcttaaatcataattatcatcattttctgtaattggatttttattgtaaaatcctttttctttatcagaattattttctttattaccgtctttaggtatatcatgaggatttttattttcattgctatcagtacttgattctacatcatctttaggagtatttggttgtttctcatcagaattattattttcattattattgttttgattgttattactatcattattttcatttccattattcccatcttgattgttatcatcctcatctctatccgggtcgtctctacctcctcctccacggtcaccatcaatatcatcattttcccgttcatcatctggcgtctcttggttgtctccgcctcccattataaatcctggtttaaaaactatatttgaatacccttcttttaatcctcctaccacttttactctaaaacaacgcaacttaaaatcttcaaaaaaaagtatagcttgatctctaatatcctcctgttcttcagatatccaattgattccatcgcttgaatattcaacaaaaaccttacttgcactatacggcatatcataaaataaaacagctacatatccattttttgtattttgaaattccagttccaaattgtctattgtttttttctctataacagatacattcaaaataggaactacatcatcatttattataattttttctttatttaacatttctgttttaaactttcctgttatatcaaaattttctcccttttccaacttttcataataatcagtaaaatcccattctacatctatatcaagttgattaccactagatgtttctaataccatatatttgggaaattttatattttctattttatcatctttacttacttttatttcatcactaaatacaccaattcccctatgacaacatttcacaatattatagccagaatctttagctatagagggtataagctcattataatcatcaattatataaactttcttactttctgatataattgattgtgccaacttattattatctcttagtaacccactttcattgttgctactatatgcttttattgaagtttcttctatctcaacatcacctttagaataaacacctatagcatgttctccattcacttcaatatccttatttagtattctaatatcattttcagtataaattcctattgcatcttttccatttgcctttattttttcaacagattcgtaggatgatttaatatgtaagtctcctccttcttcaacgtataaggctgtcccatcagtagcaattatgttgtttataccaatacttatacttccaccattttctatatgtattactccttcttttcctccttcacctattatattcaattcattatcatcaataataaatctcccatgattttttatcaatattttatatttgttggtatctattgtaaaattactgtcataaggaatataaaatctaaactcttcatctattaccatattacaagaaagagtataaactatttcttctttattatttttattttcttgaacccacctttcaaaatcttcaagacaattttcctcttgtccaaaaactttatgtggaaaacttataaaacacaaaactattatactcataaaaataaatatctcatactttttcatcttacactcctagaaattttttagctttgaaacaatcctgtcgaaacatatacttcacccactataatttttccacaattatcaattattgtcaatttatataagtatctttattaattgttataaataaaaagctacttactaaagtaaacagacgtttcactttaataagtagctatatttttataacaaaatagttataatattagaacttccttcatttacaattttttgtaaagtcttttgcattttaactcttatctcttctggcatagtatataatttactttgtaattgctcttttactaagtcatgtagtgacttaccaaacatatttgattcccataaatctgctggttgctcttcaaatacttccataagatattttatcatctcttcaccttgattttgatttccaactattggagagacctctgtagatatatctgcttttataatatgaagtgatggtgcattggcttttaacttgataccatattgttttccttgtttcattatttctggttcttccagactaagttcttctaaagaaggagctactactccatatccttttatcttggcatctattaaagcactttctattttatcatactcatttttaactttagatagtctagttatcagactaagcagttgataatctccttcaattttaaatccacttttttcttcaaggacattatagaataaatcttgctttgtctgtaaatcaatatttataacaccttctcctagctctacattatcaacacctgtatcttccaaaaactctaactcagaaaatccttgtataataccttctatatctcttattttacctatatctataatactttgttttaatgttgttattatgctactttttatccaatgatttctttcaagaccttcaacccattttggtaagttgattcttatttctgtaagtggaaaatcatataatacagcttccataacctcctctatatcttcttcttccatttcaaccacattcattggaagaactggaacttcatacttttcttccaattcacttctaagcatactcgtttcctcactttttggacttaacgtatttaaaaccactgcaaatggttttttaagatttttcaattcttgtataactctctcttctggttctacatagctttttctgtcaattccagtaactgaaccatctgtcaagacaactatccctattgtagaatggtcttttataacttttttagttcctatctctgctgccttttcaaatgtcatagcttcttgtgaccaaggagtggatactaatctttgttttccaccttcctcatgccctaaagctccttcaactatgtatccaacacaatctaccattcttacttttaaagatactgtgtcttttatttttatttctacaccatctgctggtacaaattttggttctactgtcattatcgttttacctgaaccactttggggtatctcatctcttgttctatcctttttaaattcattgtctatattaggtataaccaacttttccataaattttcttataaaagttgattttcctgttcttacaggtccaactactccaatatatatatccccctgagtccttttggatatatcttcgtatatgttattattcatattattcctcctatacatctaatcttattaaattatatttagagttaagggttaatattcttaaaatagaaaaataaagaccagcaatattaatttaatttacatatagaaatttgtaaatttcaatgtaaattaaattaatattgctggtccaaatagtagtgtattatattaactgactttagtagtattttcatttgacttattattcatctcaataagttctttacgtctttcttttgtcatgttcatccatataaatgtaaacaccaatccaattatggctactatagtaagaactatgaagtagtacctatatccagttacacccggaaatgcatccaatatcttccctgctgctaaaggacaaagtacttctggaagatatcctaatgtagcaactattcctatagcagttcctgatattgataatgaataattaccttcttcaagtaacgaatagtgtaaaccttgaattgcatacatagatacatatattgcaacacatccaatcaatagtatataaatcatagatgattttgttggtgtaaatattacacctaaaagacctgcaatcataagtataaatccataagatataatctttgatgaacctactttatctccaagtaatccagaagcagctgatgctactggtctacaatactgagctaatattgagattgcagatgcaaacaccacagtagctccaaatgcttcagttgaataaggcgtaaaataataaaatgacatattagctgaatatgaacaaaacattattattgttattatccatgtatgaggcatttttattactgcaaaaaaggcttctttatcaaattttgctgatacctctttttcattatcctttaatttgaaaaatactaatactccaactattacatttattgccgagtataatactataatagctgtaagaccagatttatcacttacttttgatgaaatatacccaaatagtatcaatactagagatagatgaattgcattggtaattccacgaccactttccataaatccaaaagcttttccttgttcattttcagatgctaacattctaacagcttttacaagagctggccaaaaagtaagtattgttgttattccccataaggcatggattaaaaacacaacaatatatggaggataaagtgttaatacaagaccagatattcctgtaataattaaagaacctgaaagcaattttctggctgaaatacggtctgctaaaaaaccaccaaaaaggtatgataccattgcaagtagaccataaatgcttcctaagcttcccatttgtgtatttgtaagattaaatgcttgtgcaaaagtatcataataataattctttaaatatggtaaagcatatataaatgctcctgctacaaagagtattatcaagactttgaaatttttccaaatgcttggtttatttacttcaactgacatacttcctccttatgtaaatacctgtaaattttcatgataattaattattgcttattttattgtttattcaatatttcggaatatttattaatatattaggttaatctatcaataatttatggtgagttatgagctaaaagtaaactcttttagctcaccataataattatatttttatttatactaacgtccagagttattagatatctttttttcatagttcttccatagcattaaacctgttattataacaaaaagacctcctcctatcatttcaatctcatagattatattatcttttaaagtctccataactggtgccgttgagaaaagtatgccaactacagttactacaagtaccattctggcaatattgatacaaactgaatcactttttgcaattgaatatggtctttcttcatttggtcttgtctttctaagtctaatataagatgtaaaaagcaagacatatggaaataatgctgttaatgctgtcatagtaacaagaacattgtatatattatctactgatggtaataagtttgttcctacaagaagtagactcactattatagcctgaactattactgcatttgatggtatattgtatttatttgtaacagtcaattgcttaggaaatacaccttctcttacatttccaaaaagcatctttactggacctgctatataaagtattaatgctcctagtactgataaagttattccaaatgctactattcttataaaccaacttcctatacctaaatcttgtgcaactttagctaatgcatctagtatccctgtagacgctgcaattttatctggaggaagtatcattgttattgctactgaacctaagatatagattcctcctattaaaacagccacagttaatatagctttaggaaagtttttcttagcattatccatttcggttatgaaattagcagtcgtttcagctcctgataatgcaaatattatagcagatatagaaactaatgaattggcatctatttttggtattatattttggattgtatatatcgatgctgatggagcttttttgagaataactacagacataaatgccatcactataagtaatatagcaggaattgtagaacctaatgctcctgtattcgtaaaaaattttccaaatgccatcccacgagtacttactaaggacaacagccaaaatattatgagtgaaagtgctaaaataaacatcttattgtttgataaatctggatttccaagcatatatgcaatatttatagctaaaaatgtcaagaaagaagaataccaaaatatctttgatgtccaatttagccatgacaccataaatccccacttctctccataggcttgtttaacccattctccaagtccaccatcttttggatatgttgcagccaactctgcacatataagtgatgcaggaacaaagaatataaaagcaaacaataaccaaactggtatagaaccaagacccaatccaaaactagaggcagtagatttagctatccatctaatcccaaatagtgctgatatattcataaatactaaatcccaaaatccaattttctttttcactgtaattcctccaatttcaaatttattcaaactcatacacaatgtattgatttaaatatcaagtataagttcttcaacacttcttggataattagttataattgtagcaccattcttacctactattgctgtatctgagtgtctaaatcctccaactccaggtatatatatccctggctccatagaaaataccattccttcttctaatattaattcattgtcaaatcttaaatatggctcttcatgttctgataaacctaaaccatgaccaattctatgatttgaatataactctagaccatactttgcaacaacagctcttgctgcttcatccaccattcttgctggtataccagcttttattgtatctaatccagcttgttgagcctctactgcaatcttaaacacttctttttgtctttctgttggtttacctataataaaagttctttcattttctgctctatagttttcataccaaacctgtctactatgtattactatatctcctctttgaagtatcctagtattggaatctaaatgaggttgtgctgttctatcaatccctgaacaagtccagtttgcaaatcctatatatgtatcaggataattttcagaaacatattttagtaaagcattatcccccgcaacgtcaaactccaattcactcatcccaactctaacattttctaaagacccttttattcctatatcagataggtaacctgctatcttcaaaaattctatttcttttgcatcttttacatatctcatttcaaatattttacttccaacatctttgatagcaaatgacttatcagttatatactctgaaaaacttgcagatactatatctttttctattccaacagttgttcctttagggtatttatttaaaattatatctaagtaatgtttatgtgatattccatgttctttcatttctggtatttcataatacacatatacattatcaacttttgcaacttctttagcatgtaattcttctaatccaggtactattaattctattttatcttgagttactactgttacaattggtctagaataagttattgctttaaatccactaatataaaattgattgtctggttcaaatattaaagcaatttcaatgcttttttcattcatgtactttctcaatctttctagtctcatattatttgacataatgcacctctttcttaatattcagataatttattcaatacaacaaggataaatatattattttaaaattcttaatatttttagtacttgtcgtatttgcatgtaaattaattttatttgtgattattttatcataatcatgattattttgtcaatcacgattttatttttaaaatttttttatattctagtgattttaaattatctaaaatataacgagtatacattgtattttggaatattattcttgatttatggtaagtttaatgataaaatcacgattatataaactatattgattatttgtaggtgaataaaatgacaaataaagaattacaaaagaaaaggatattgatgtatttcatagaagctgctcaaaatattatggaaaacgaaggtatagaaaatattacacttcgtaaggttgcagatatggctggatataatagttcaactctatataaatactttaaaaatttagaccatttaatatcatttgcatctataaaatattttaaagattataacttgaatatttcaagatgtatagaaaatgtcaatgatgaatataagaaatatataattatgtggaaattattttgtaagcattcttttgacaatgctcaagctttttatcaggtattttttaacttgtctagtgatgaacttagctatataacaaaacaatattatgatatgtttccagaagatttaggtattcatgatagtgacatatctttaatgattacaggagaaagtataaaggaaagaaataagatactattaaacaatcttgtagatactggatatataccagctaaagatttagacataatcaatgatataattatttctttttatcaaaatctattattcttaaaaaagaacacaggaaaaaattctggtgatgatgaattaactatgaaaatgatttcttctattgaatacataataaaacatgctaaataaaattaaaatatggctgtctcaaaatagagataagccttttttattgttgaaataataaaaatatatttaatttcatataaaaaaaagtgcctcgtaaactaaaaagttcattttgagacacccctaaaacaaatttattatttattatacaatagtttatatatcatcacctaaaactacttcttccatttcatgctttttacttctcatcattagttctattccaacttctttaggatttgaacctttatttattacagaatatatagcattagttataggcatatctatatctaatttttcagcaacatcatgtgctacttcagtagcagttatgccttctacaaccatctttacttcttttaaagtatcttctaaactcatacctttacctatgagtataccagctcttctatttctactatgcatacttgtacaagtaactattaaatctccaatacctgaaagacctgcaaaggtagacatattagctcccatagcaattccaagtctgctcatttcactaatacctcttgtcataagggcagcttttgcattatcaccataccctaatccgtcacatatcccagctccaaatgctataatattttttaatgctcctccaagttctactccaactatgtctggattcgtataaactctaagtttagggctcataaataaatcttgtatcatctgtgctatttttaaatctttagaagcaactactacggtagtaggaatatcccttgctacttcttcagcatgagatggcccagatagtattacatatggattttgtggtaattcttcttcacagacttgagataatctaagcccagtccctttttcaagacctttagctacattaacaataacttgtccttcttttataaatggttttattttttggcaagtacttcttacagcctgtgatggaactgctaaaactattaccttacaatcttttatagttttttctatatcagtacttatagttatattgtttggaaataatactcctggtaaatagtctgtattttctttagttctgtttatttttttagcttgttcctcttttcgagtccacatgctcacatcattacctttttttgcaagccctaaagctaatgcacttccccagcttccagtacctaatacacatactttctccatgtttaacaccacctgagtataatatatttactattctttcttttgaccaatttttctctctgtcccatttaataatcgctttatatttgctctgtgattatatattactgatgcagttaagaacagagctactattaaaccagctttattttttaccataatcataaatattggtgaacatcctattcctacaacagaacccaatgaaacatactttgttatagctaccaccaatataaatactgctagacacattagtgttattactggatttacagctagcattgcacctagtgaagttgcaacacctttacctcctctaaatcctaaaactgctggccaattatgacctgctacaacacatataactgccagatatccagctaaaagagtatctattccaaccaatcttgctgcaaattctgatattaaaacagccattacacctttaagaacatcacctaaaaatgtcattgctcctgctctttttccaagtgtcctaagtacatttgtcgaacctgcattaccagaaccttgagtccttatatcaaccccagcaattcgctttgcaactatgtatgaggtagatatatttcctaaaagatatgcaactacagcaataattatataactaaatatctccactgaatttcccccctttagttatattttaagatatttattttttatttttttgtctatactcaaactttatggaagttccttcaaatccaaaattttctcttatcttattctcaaggtatctttgatatgagaagtgagttaaatccttatcatttataaacaatgtaattttaggaggtctaatgtcagtttgagtcccatagtaaatttttagtcttctacctttgtcagatggtggttgatttaacattacagcttctccaattacttcattcagtgctgaagttgatattctcttagaatgttcatttgacacatattcaactgtatctagtatcttgttcattctttgattagtttttgcagaaacaaatacgattggagcatacatcataaatggaaatttttcttttatatcttttgtgtaattactcatagtcttattatctttctctattaaatcccatttattgattacaaatatgcatccttttccttcatcatgtgctatacctgcaacctttgtatcttgttctgttacaccttctaaggcatctattactatcaatactacatctgctctatctacagcactcatagctcttattacactgtatttttctattgtctcatatattttactttttcttctaagccctgctgtatctattagaagaaatttctgtccatttttttcaaaataagtatcaattgcgtctctagtagttcctgcaattggacttacaattactctttcttctccaagtatcttattgagtatagaactttttcctgcatttggtttacctgttatagctactcttattatatcttcttcatactctgtatctaatcctgctggaaaattttcaactatctcatctaataaatctccaaatcccatactattggctcctgaaactgcaaaaggcgttccaaatcccaactcataaaaatcatatatattatcaaattgactttgactatcaatcttattaaccactaagattactggtttttttgtctttctaagcaattgtgcaatttctttatcagcagctgttattccagctttaccatcaactataaaaagtattacatgtgacatgtccattgcaagcatggcttgatttctcatttgagataatattatatcttcgctatcaggttcaattcctcctgtatccactaatgtaaaatatttatctaaccactctacttcagcaaatattctatctcttgtaactccaggtgtattttcaactattgatatcctttttcctgcaaatttattaaatattgtagacttaccaacgtttggtctcccaactacagctacaactggcctacttatactcattttatttctccttccatcttttgttttctattttaaaattttatccacaaagtcttttccttcattcaaacaagggataatttttattctcataagttcttctaattgatttaattcaatattatctaagaaaatttcttcatctgcttttagcatacttcttgttatataaagagcttctcctaattctttatcttcaagttgttcttttaaatccttagctgttaaaagacctgatacagttattgtctctccaaaaaacttgtttttgatttcatatacatttacttgaagatttttaaacttgtccatcatagcatctgccatactctgtataaattcatatgcagaatgaccagtagctattgatactttcttctctctttttagaatattctcaggcaatatatttagatactcttcaatctctgtttttaacttacgtatcatacctacaccatcttcaaactgtaaaaaaccttcatattcttcatatccaggcaattcactattagatagtatataaaattcatctgataaaaatgcaaatcgagtacctaatttttcaagatatttctgttgtatttgatgtatttgctctatagttttacttgcgctcttatcattaaatatatttaattctactagattttctctatgctttgtaatcccaactggaactatcgcaacactgtttacatatggataaagttgagctagttcttttattgttctatccaattcctttccatcatttatacctggacataaaacaatttgacagttcatttctatatgagcatctgccaatctcttcattataccatataattttcctgcaaatttattgcttatcattttttgtcttaactctggattagttgtatgcacagatatatttataggacttattctatattttataatattatttatatcttcttcactcatatttgtaagtgtgacaaaatttccttgtaaaaaagataatctcgaatcatcatctttaaaataaagagtttctctcataccttctggcaattggtctataaaacaaaacatacacttatttctacagcttttagcttggtcaattatcggatttgtaaattcaacacccaaatcttcatcatagtctttttctatctcgtatatgtagacttcgccatcttttttttgtatttctacatctaaatattcatcacttagtaagaatctatactctattatatcatgtattggctgttcattcacagatataagtaaatctcctacctctatacctatttcttctgcaatactatctttataaaccttacttataatattatttactttttttacatttacttccaatattttcaccactcttttgtattcatcaatgcttattataatatattttaatatgcaatttatttatttattatattttatgatagcatttttaagcatttcatgtcataataacacattttaattctaatagtcaatataagtaaatagctataaaatagattagaacaaataatattcaaatttaagtttcttaaaaatttgaatattatttgttcttaaaaaaattttataaatttaatgttttactatgattaacgtcccatttgtcatatcatgaaccattccacctacacactttgacatcaacaatgccttattttgtaagtctttctcatcatttgcataaaatattggacaacctccaccatttttcatattcttatcaagtgtaactatagctagggtatattcatttaaacctatatccattcccatcttatgcacttcctttctttcctattttataattttttagtgataagttttttcctttagagcttgaaagtattgggcatgactttacagcttccattactttttccatattcttatctactggtaaataagcaatcattatactttcatcctctttatttcttctaggtaatggtacgaatgaaggttctccataatctccatataaacctaaccttgaatatatattgtatactattgcttgtctttgaccggagtcaaataatattcctgcattagcataatccttatttttaggaattatttgtattcctacacctctattaatatatacttctctatcactttttagacctatatttgttataccttttaaatctcccacctttagtatagattcgtccacaaaactaatttcagcaggcattacatcagctatgtctccaatactttttctagtaagaagtttttttaatataaaggctaacactaatccacaaattgaacttattaccaaactcatcccttcacttattttcgtttctgcaagtattacataatacaatcctattgttaaaaaagatgtaactatacacatataatttcttacttcataggttctagctatctcttctatgaatgcagcacctctctttacaagttgaacttcctctaaattttgcaatgtatttcttctatttgctctcacttgtctaaattgttctgctgctagagataaaaatgttatggatgtataagaacgatttataagagctggaaccaataatgctcctaatgaagaagcgacgaatgctaatataagttgagatagtaaaacatttggttgcgttggatactgtttttggtctaaattcaacattataattctagatgttataccaataataacagcaacaaaaaatactctatccattaaatcactcctaaaatatttaatttgaaattttacatgtaaatctacaaagtctttctagaaaaatcactctgctttccttttgatgtttctatgataggtgtacttttcactacatctatcatgacatctatatctttgagtattggcatatatggtataaccacagtacttttttctaaattggtcttagatatagcaacaatatcaacctcatctacatctctatctatccccatatgaataaatagattatgtattatagcttgtctttgccctatatcatttactattccaaatgcacctaaatctcttggtataacttctatggccagacattcatttctatacttttctcttgtactttctagacctatattagttattattacatcatttaccattaaaataggtccttcaaaacttatttttgcaggaactatatctgctatatctgctatactgtttcttcttaaaaatcttctaaaaatcaagccaacaatagctcctgacacaatagctaaaattgtgcaatgaaaaaagctaaggtcatactttcttgcaaaaacgatataaactatcgaagatactagtgcagaaaaaagacttatataacttctagattcatacgtagatgctatttcttcaacataagcatctccttttggtactaattcttcattatcaatattctttagtgttattctttcttgttccgcaagaccttgaaactgttgtattgctactgcaaaaaatgtcaaggctgcaaactccttatctataagtgcaggtaatgctatagcacctaacgaagctgaaagcccagatataattatctgttctaaataatcttgtggtcttgatgggtattgtttgtctgtaactcttaaaactaatcctctacataatattcctacaactaatgcaactataaaagagtgtctaaataaatttgcattcaataaactttcttccattttctcagctccttctcttatatagtttgtgcaaaaaacaaaaaaaattcccttctatttaaggaaatttttttgtaatattgtaactataaattcgctaccaatgccaagttcactttttacttttatacatccatttagtgatttgactatatgctttgttatagccaatcctaaacccgttcctcctacatccctacttcttgctttatctaccctataaaatcgttcaaatattcgttctacatcttcttttggtatccctacaccattgtctataactttaattacgattttttcttcatcttttaacactacaacttgtacaatcccattatcttgggtatactttatagcattatcaactaggtttaagaacacttgctttatatagtctttattggatagtatacttattgatttatcatcacatttatataaaacttctatatttttttcactagctgaatgttgagttatttcatatacctctttaaatacatcatatactacaacattttccataagaagagtatctttattttctacaaatgataacagcaatatatcatcaatcaacctttttaatctatctgattcgctttctattatttctaagaatctatttctagtattcacatctatattttcatttgactttagtgtttcaacaaacccacttatagatgtaagtggtgttttaagttcatgacttacatttgcaacaaaatcacttctcatattttcaagtttaacttttttagtaatatcttctatatttactatcgaacctattattacgttgttagtattctgaagataaactgggtctacctttatcttatatacgatatcatctttagtagtaatattagcagtttcattatctttagaaccaataaattgaagtatttgttttaatatttcttcttcttttattacaacattaatattatgaccttcaactaattgatttggttcactctttatcatttcttttgcttcatcatttatcagaagtatatttccatttacatctatagccaaaattccatgagatatactctttaatatagatcttaactgtaaatgtttatactgtacttcttctaaggttttatccatattctttatcatatgattaaaatttctagctaattcaccaagttctcctttggctgatatgttaagcctagcatgatattcattattacttactttttttgagacgtatataaactcttttaaatatttccttaatgttattgtatatcttacagctaatataacaatggctatggacaacataacaataaaaaaatatatactatttaaatcttccacaagataacactcctaaaatataacctttttaatctattttataccctacacctcttatagtctctatatatttttccgatttatcttcatcttctattttttttcttaaatatcttatatgaacatctactgttctagtttctccatagtattcatacccccatattttatccaaaagataatttcttgaaagtacttttcctttattttgaattaataattttaacaattcaaattccttaagagttaactctatcttttcagagcctttggtaacttcatgttttgataaatctagttttaaattgcctgtagtaagtatattgttttcttcacctaagctagtcaaattatatctccttaaaacagaactaatcctagctaacaactcttttatactaaatggcttagttatatagtcatcagcacctatttcaagcccttcaaccttgtcattttccatatttttagcagtaagcattataacaggaatattttttaagtccttatcacttcttatttttctcaaaacttctattccacttatatttggtaacatccaatctaaaagtattaaatctggtttaatttccttagcctttataaatccgtcaaatccatcatatgaataactaacttcgtaatttgacacctccaaattgaattttaatagctcaactatatgcatttcatcgtctataacaagcactttagtattcattaaaaagctcctctctattttatctgtagtaccgttcctattcgttctgatgccttattatgttttctataagagtggaatttatctgctctacaactagtgcataaatttaaatttattatattttcttttttaactccactacatctaagcatatactcattaattttccataaatctaaatagtaacttccctcttttattatatagaacttttcatcattatttgtaagaattgtgttaaatttttctactaaatcttcagacacttcatagcaacatggtccaattgatggcccaattatacatactaaatcttcaggaactgttttatagcattcagacattaattttattgttttatgacctatattactaaaagtccctctccaacctgcatgagccagtcctatggctttatttttagcatctataattgatataggtacacagtctgctgtaaacagtaaaagtggtactttttccaagtttgttataagtgcatctccatctcttcttttccctatagtatctttattgactatattaactatatctgaatgtatttgagaattactagttatattttcaaatgtcaaatcacattctttacatacttttaacatatcttctctattttttgcatctatattcttacatgttataactagatttacagaatttaatttttcatcaagttcttcacaattaccacttaaattaacatactctttaatatcttgtacattttttatatttatataatctttcatcatttgtctcctttttctatcagtatacttttaagttcatttacaaaagtatttatatctttaaattgtctatacacagaagcaaatcttacataggcaacctcatctaactctttcaatttatccattaccatctcaccgatttttttggtttcaatttcttctataaaacatttatttatttcattttcaatatgtacaacaatactttcaatctcttcaatagaaacaggtcttttttcacatgcttttagcaatccatattttatcttttctctatcaaaatattctctactattatcctttttaatgaccattaaaggagttgtttctattttctcatacgtagtaaacctctttttacatgattcacactcacgtcttcttctgatagattttaaatctgtatgtctagaatctattacctttgattctttataattacaataaggacattgcatctatattcctcctttgtttaactatatctcaaactcatctaagcttaattctgaacctatatttactattattgtatcacaacctattttaagtatatcattccaaaatataacttcttcatcccctcctcttgaaaaaaaacttctacttccatctccaaaaatggtaaatgagactaccttaccttcgtgaatatccatgtctatgtctattataaaccccatcctttttccattttttacatttataatttctttttccattatatcagaaactctaatcatattgtactcaccctttctttaaaaataaatatgtatcgaagtaaaaaaaaatgacctatataggtcatttaaattaaaataatgtttacagtccatggattacttatacatattttctcatattttttaaagcatttttttcaattcttgatacttgtgcttgagatataccgatttcatcagcaacttctatctgagttcttcctttgtaaaaccttaaatctaataccaacttttctctactatttaatttcttaatagcttctttaagtgatatttcttgcaaccaattttcatcagtatcttttttatcttgaacctgatccataacaaatattgcatctccattgtcttgatatactgggtcaaacagagatattgggtcttgtatggcatcaagtgccattacaactgattctacttctaattctaattcctttgctatttctgatactgtaggttctttagaatttgttctaattaatctttctctaacttgtagtgccttatatgctatatcttttaatgacctacttactctaattgggttattgtctcttagatatcttctaatttctcctataatcataggaacagcataagttgaaaaccttacattttggcttaaatcaaagttatctatagcttttataagaccaatacaacctatttgaaataaatcgtctatattttctcctctgttgttaaacttttttattacactcaagactaatcttaaatttcctcttacaaactgttgtctggcttcttcatcaccattttttatttgtaataaaagttccttcatttgcttatttttaagaactggaagttctgatgtattaacaccacatatttcaaccttattaacttgcatatattttcagtcctctctcaaaagtattcatctattgaaattatttacatttccaatttttttatactttttaagaagaattaatttaacattatacaaattttttcatttctttttgcaaccttgagattattttcttttcaagtctagatatgtaggactgtgatattccaagcattccagcaacttctttttgtgttttttcaatacctttatcaataagaccaaatcttaattccataatttgcttttctctgtcacttaatctgtcaagtgccataaccaacaaatctctatctatttcttcttcaattattttgtatatttcatcattttctgtacccaatacatcagataataaaagttcatttccatctaaatctatatttaaaggttcatcaaatgatacttctgttttctttttattattttttcttaagtacattaatatttcattttctatacatctcgaagcataagttgccaattttatatttttattcagtttaaaagtattaactgcttttatcaaacctatagttcctattgaaatcaaatcttctacatctatacctgtattttcaaattttctcgatatgtagactactaatctaagatttctttctattaaaattgactttacactttcatctgtttctagcttttgtaaaagctccatttcttcttctggtttcaatggaggaggaagtatatttgcccctcccatatagtatattccctttggctttattatttttaatttaatacctaacatagtaataaagcttattattctttctttcaatcgtaacattccttgtcccccttaaattttcacctaaaatccaggcaatatatttggattcattattgctccatattctctatcattaaaatttgaaataccaagtattatatttcctatcttttgctcatctacttctatatagtcagcttttaagcctattattatgcttgtcttattacttccagcatgtttataaggtattattctaactctacctgaagttttatcatctaaacttcctataatttcttgtgctttcttcatatctatatcttcataattaatatttaatagtttttctggaataaatccttctaacacactagacttaactattattacatcactttgacttattgggtcttttaacaaattaccactatctactaaagctttacagcaaaaacttttttctagtaagtttatatttatagtctttgtaagctccttaatgtacttaagcattttcaaatctttataaatgtattttaataattcacaactcacataagtacatgcaattaagaaagatatttttaagtgacttattcctgtaaaataaattataaaataagtgcttccagaaataaaaatgtttactagataaaaaactaacgctacatgaacataatcttttttgctcttgcttctaaatgaaattaaagttattatgctcatgattattattttaaatggtacagtaaatagtatattcattgatggatacaaataagcaacagaataggcacttcctaaactagcccccaataacttattttttttaggattatatcttttagtaagaatagaagtacaacttataataatataatttattactaggttttctataacatagtactcaatatacaccatgtatccccccttaaaacctttaaacatattataagatagtatgtacaaaattttatgtcacttttgatggtcgaatccaaaacaaattctatttaaaaagaacaatgatatatgtcttatactttatgtcgtcaaaagatatttttttaatgccaaacagatagacttttttgtagaatccaatatatctaggtagaagttattcgctttacttttggtatatttataaaaaaaagactacataatttaataatatatcaagtaaatcttttacttatataaaatcaaattatatagtctgtaaattcaaatataaattattgtgctagtaatccatttgcatattttgcagattcatttagtgcttgttctggagttatgtctccagctatcatcatttgaagttgtttccataaatattcatatatctctactccatgaggtccaactgtcaatggtctatacatatgtttatctcttgtcaccatttcttcaaatcttgggtctccttggtatttttcacctttagcaactggagctctaggtatttctttgtggaaagcttccattgattctttgcttaacatatactcaagaagtttaaatccaagttctttatttttacatgctgacattaatgttaaatcatctactgaagcaaaacttccaactgtcttatcttctaatgatgttacatatccccagtttaaatccgggaatgatttatcaaatgtacttgtagcagcagaggatagcattatagtaaatgcagcttttcctggtccaaatacactttcaatcatttcattactatcttttgataaagcatcttctggaatatactttttcatatcatttataaagtttgcagctttcaagccttctgcattattaaatttaactgattttaaatcatcattatatatatctccaccagcttgccataaatacggataccagttccagtttaagcttccaaatactttagaaccccaaccttgtgcaagaccccactggtcgatttttccatctccatcagtatcttttgttgctttttcacagattcttttaaaatcatcccatgtttttggaggtttttctcctaatttttctagtatatctttattgtagtacaatacgcctggattagcagcttctataggtaaaccataaataccacccatcatttttgcatcatctaagtatagataattatctgaagttcctgatttttctaaataaggtgttaaatcttctactgcacccatttctataaattgagggaacatctctgcatacatgtatcctatatctggaccttcacctgcacttattgctgttgcatatttttctgcgtagttatcccatggtactatctgaaattcaatttcacagttattttctttttcaaatttttcaaatatcggcttccatgcatctgcatcatggtctgttaatggtgcagaccatacaactaatttttctttaccctctttgcctttagaatcttctttttttgaacatcctgcaagaattgatactgatagaatccctaccataactaaagaaagaaccttttttagtttaatcatgcttaatcccctttcagactttaatttgtctttttcctcaaatgtttacatttaattcagatttaatattaacaaataagactactcttgtctaatcataaaaaactatactaactcctataactatattttttttctatacctattagatttaattcatactaaaaacttactttttaaattttatcaatatttaaaaatatttttaagtctagccacaaactaactatctaaattgaacaaaataaaaagaagtctattgacttctttataagcttacatattatcttcttcttcttaggaatgtaggtatctccatgctctcatcatcatcttcttcaattatacttgcctttttaggaggctctattttttcctcagcaattacttcttcttcaatttcttttacagcttgttttactgttgtatttaatgaagaacgtatgcttgatttaggtttagtatctaaatctaaggcaccattttgtaatccttcaaatcctgttgcgattactgtaatcattatttcatcacctaaatcttcttttatagaagctccaaatataacatttgcttctgggtcacaggattccataactaaagttgatgcctcattaacttcaaataatcctaagttaggaccacctgtaacattaagaagtactcctttagctccttgtattgatgtttctagaagtggagattgaatagcttgtcttgcagcatcaattgctctagtttcaccactagcactacctatacccatatgagcaagtcccttgtctttcattatagtagtaacatctgcaaagtccaagtttattaacccttcaactgctataaggtctgaaattgattgtataccttgttttaatacatcatctgcaactgcaaaagcatctaacattgatgtatttttttgtactatctgtaaaagtctatcatttggtatcgttataagagtatctacttttgatttaagttctgctattccaccttcagcgttcttcattcttatcttaccttcaaatgcaaaaggtttggtaactacacctactgtaagtatccccatttcttttgccaagcctgcaaccactggagcagctcctgtaccagtaccaccgcccattccggctgttacaaagaccatatcagctccttgaagtaactttactatttcatctttactctcctcagcagctcttttccctacttctggatttgctcctgctccaagtcctctagttaatttttctcctatttgaactttatattcagcttttgatgtatataaagcttgtttatctgtatttactgatataaattcaacgccttttagttgagcttctaccattctattgacagcattgtttccaccgccacctacacctattactttaatttgtgcacattcttctaattctacgtcaaagtttagcatcataaacccccttctctcatgattcaaagttatcgtatgtattaattatatcattttcttcttttattttgttaacctttaagtaacatattccacaaaaacgtaaattttcctttttaaatttcttacttatattgtcaaatattactctttaagtataaaataatttacgtatatattaaatgctctttaatttttacgttttttgttcataatattactaataatatatcgtctaattatagataagttattaaacaatctcataccaaaaactagtacagcaacatagtaaagagaaactcctaacttttctcctatataagtcaataatatagccaatatagcattacctatgaaaccagtaataaaaattacattatcatagttatcttcaaaattggattttatcgctccaaaaatagaatccattattgcaagaatagctactgacatatatatggaataatccatagaatatgtaaatggaatatagtaacctactactacaccaaatgctaatcctcctaaaacccacaacataaatcttcacctctttattttactttgaaacacaactacattacaatcctttttattaattttttttactttttctttatttttttgtatttttcgttttattttgcaaataaattcactttattcccattattttcctgaacttttatattaattccatatatatccttaagagatttagcatatgattctggagagtttatagctgcactcaataaatctatatctcctatagcttttattataaatggttgtccatatgtagtatcatttactgtaatagtagctcctgaacattttatcttacttgttgctagtactctttccccatttatagaaattgctcttgctccagccttttttaaatcatttaaaactctcaaaatatctatatcatgtataatcaaatcatttggattctgtccgtcttttaactctctctcactatccctcatagtaatagttatgcctggccctgtaacagttgaataaccacttaattctttaacttcttcaagctctttttgcataagtgtttggatagattcatttccattcttttttgcttctttatattcattcaaagtttttttgttgtttttaagagtttcttttaaattttttatttctttttttgtattttctacctcactttcaatactttcagtttgacctaatgttatgtatactctatttgggtctagtgattttatataagttgatatgaaaatgcctaatatgaatgctcctaatataactattttctttttcatactattatttcccctctgctttgtttatatcactatgaccatttatttctatattgtcttctttggtcacttttactttggcattataatatgtttctatttcccagacaataccatactttatattaagtgccgaagccaatgtatcagaatcaccaattgcttttattataattggttcttttatgacagtgtcattcatacaaagcttgtcttcttttaaatacatatatgtattaaaaactattctctggtcgtttatagatatggcacttgcttgtgctgaatttaatttatttatcattgacaataataaatcataattatatagtatactatcatttttatcagagtttcctaagtcttttgtagaatttatctcaatttttatgcctgttccttcaacatctgtatatccagctaatgtttcatatttttctatttctgacttaagtatgtcttgttctcctttattgtttttgcctctataagtctctatatctttcttcacactattaacttctgattgtagattctctttttctgtttttaaagatttaagttcttctgtaagttgctctcctcttttaaaagttgtcatccctctattttctatattaataattttaagttgtaaactaacaagaacacccaatacaacacttcctatgattatacttttatttataaatctttttttcaatatatcacttccttacaattgtctatccttctggactatacactgccaactttccatagttaagatttatagtccctccattagtatttttattttgcaggtcaatcagaattttacttaccctagatatattataatctaagttatcatcattagaaagtaagatttttatattacttcttgtaagcatttctatattgctttctttttttaagtttacataatttatttttctataaattccttcttcttttaaataatttaaagttttaaatacattctccttagttttataatttttaaattttatagatttattatcatcaacgctataatctacatctactatcaagtcttttttactttcattagaacctcttagttcttccaataaatttccttttttatctatataacaataattatcttcatcttttaatactgcaaatatttctttttcttttaaacttataattatcttattgggaagttttctttttatttccacattttctatatatggattttttataagtttatttttcatatctttaaaattgtatgcaaaaatattttcatttagatttatatttagttctttcattatatttgatttggtcaccctcttatttccaattacatctattttctttacatcaaataaatcactttttacaattatacatatacaaaaagataacataagtataaaaactaaaactatcatgacattattcgtatttaactttcttctttttttcaaatataatcaacccctttggttaataaatacacctttagagcttgtttttcctacaaaaaaattataatatttaaagtcaaatttttgcattttattacataacatccaaataaggtattaaattttataaataaatcaatatttcatcaaaataaacatagtatactacatactatttatatatttaaatctgtatacatacaaataaacccctaatttataataatttagaaaatctaatatattataaattaggggtaaatatttacttatcttttctttattcctattaccttagcttgaccttctatacttggagtcgtttctttttttatttcttttacttccttaataactttttccttttttgtttttttagaagttgacttttgtgttgaattgtatactttcattatctcatcatatataaggtctatggcttcaggcttacctatagttttacttgcatttgccatatcaactaaaagttctctatctcctaaaagtttaaatactgctgtatttaggctctctggagttagatttttttctaaaatagcaattcctgccccttgtttttctatactcttggcattatactcttgatgattttcagcagtataagctttaggtattattatagatggctttccaagagccgttatctcagctaatgaaattgctcctgcgctacctataaccaaatcacttgctgcaagtgcatttgccatatcttctaagtaaggcacaactttttggtatggtttaagatttatatcgctaatacttcccataaattcatcataatagcttttgcctgtagcaaatataaaagctatatcttcatttaccatattctttattacaagtctcattgcatcatttatttttcttgaacctccactaccaccatagcaaagtaccattcttttttcgtcacttattgatagattctttcttgcaatattttttcttgataataaaatttcttttctaactggatttcctgtaaaaactaatttatcttctgctgcctctggaaatcttttatgcgaatcttcaaaacttgtaagtacctttgtaactgttttagataaaatcttattagttacaccaggaaaagaattttgctcatgtattatggctggtattttccccatagatgcattaaataaaacaggtccactaacatatccaccagttcctataactatatctggtttaaatttcttaacaatctttcttgattgctccaaacctttaaaaagcttaaaaactctttttacattatcgaaatctatttttcgcttaaaaccttgaactgttacagtctttaattcaaatccatacttaggaactatttctgactctattcccttttccgtcccaacaaaaattatctcagcgtctggatgctcatctcttattttgtttgcaatagctatagctggatacacgtgccctccagttccaccgcctgataataaaactttcatcaaatcatcatctcctgttaattaattttgacatgctttgagatgtttaacactattcctacagctcccataaagatggtgagtgaagttcctccataacttataaatggtagtgctacacctgtagctggcattgatgatgtcgcaactgctatatttaaagctgcttgtattccaatttgtgcacctatacctataacaaccatacaagcaaatacattagaagtcttcaaagctattcttacacatctgtagactaaaactacaaatagcataataactattatacaaccaatcaatcctaactcttctcctattatagcaaatataaagtcattttgtggctctggtatataaaaatacttttgtttactctttcctaagcctagaccaaacaatccacctgaacctagtgcatatagaccttgtattacctgataccccttaccaagagggtcttgaaaaggatctaaaaatgatgtaacacgactaagtctatagggttcagcaattactaatgcagcaaataaagcagccccactccctatcatagcaaatacaattttcatatccattccagcaacaaatatcattacaaaagtaactagaattacagtacctgctgttgacaaatttggctgaagtattatcaacgcaaaaaatatccctggaactacgagaagtggtacaacaccttttgtcaaagattttattttatcataatttttttcaattaattttgcagttaatattattgtagcaaactttgcgatttctgcaggttgaaatgttaaagctcctattcccaaccatctttttgctccgtttgcttctatccctaaaggggtcaaaactaacaataataatactactgctatagctccaattgctgtagcatttttcttccaaaaactataatctattcttgatgtaataatcataactataaatccaagtacagcatatattacattcttttttagaaaatagtacgcatcattgtgtttaaatgaagattgtataaaacttgcactaaacaccataactattcctacaaatactaaaagcatagtagtgtaaaacactactccatcaaattcagtcttcatccttatgtcaatttgttttttcaaattttctttaggcatccaactaatctacctccattcttccatttaagtaagtttagaggtaagagattattttaaattgtttacattatctttgaagtcttttcctcttacttcaaaactttcatacatatcccaacttgcacaagctggtgaaagaagcactatatctccactttttgaaatttcataagaagtcttaactgcttcttccatatcttttactatatgtatgtcattaaatcctttatttttagcacaattttctatatttgatgcagtttctcctaataagaccaatgatttaacatatgactttgcagtttcaagaagttcatcaaaattacttcccttatccatcccccctgctataagtattataggtctatcataagactgtatagcttttatagtggaatctggattagttccctttgaatcatttacatatattacattgtctaaatttcttacaaactcttgtctgtgttccactcctttaaatgtcataagtacatcctttgtaacttctaaatcaattttgcagacatatgctattgctatagctgccatacaattttctaagttatgacctccaggtaaacttacatcatctttatttagaaatttgattttatcatctatatctattattatgtcattattttctaaatatactcctccatttacttttttagttcttgaaaagtaaattactttggcattgcatttatcagctaaagattttactacctcatcatcatagtttaacacacagaaatcctcaacagtttggttcataaatatatttgcctttgcttctatgtatttttccatagtatggtgtctatttaagtggtcctctgtaatatttaatattgcgcttactttaggtctaaattcatctatactctcaagctgaaaactgcttagttcagttactaacacagactcttcacttgaagtttctatagtatctattacaggatttcctatattaccaactacatatgtatctcgttttgctcttgaaaaaatttctcctaccaaactagttgtagttgtctttccatttgtacctgtaatccctataaaaattggattattcgatagtttaaaagctaattctacctcaccaattatatacttgcctgaattttttaatttcaatatgaatggtaggtctagtggtacacctggagacactacaaccatatctatatcatctacatcttctgggtgatgtcctaatatgtattttatgtcatttatagatttcaattcatcaagtatatttctcaatttattttcatcttttatatcatttacgattatacttgcacccaatttatctaaatgtttaattgtagatataccagtttttgcaagtcctactaataaaactttttttccttttaagtccatttttcattccccctagccctaaaatactgctattatacttatccaagctaaaacaactgttataatccaaaaaataaatacaactcttgtttctggccaaccacactgttcaaagtggtggtgtattggagccatcttaaagaatctctttcttgttgccttaaaatatccaacttgaatcaaaactgatagagcctccgcaaaataaattcctccaattataggtattataagcactgagttagttagaactgaaaatgctacaactgcacctcctaatgccattgaacctgtgtcgcccataaacactctagccggatatgaattaaatcctaagaaacctaaacatgctccaacagttgctgctgctaaaactgcgacttctgtatttccagcaatagaacttgcaaatagcataaagaatacagaaactattaatgttactcctgatgctaatccatctaatccatcagtcaagtttacagcatttactattgctacgattataaacatcattattggtatatataatattccaacatttatcacaaaatctgtaaatggtatcataagttgtgaagcacttgatgatgatgtatactgataaaaagcaacataaaaagataatgcaacttgaaggattattttttgatatgcttttagtccaagtgatctttttagctttatttttataaaatcatctaaaaagccaataaaaccaaaacctgcaatacatataagacctactgccatatcatgactaacttttactcttgtaagtccagttattagaattgcaacaatcattataattccacccatagtaggtgttccgtttttagctagatgtgtttggggtccatcatctctaactgtctgaccaaatttaaattttctaagcattggtataaatattggtcctattataattactattaaaaacgcaatcaatgcggtgtacgtaagctctgttattcctaacatcataaaactcctctcccttgtcaattaactcattagtttaagcttatttatttagatattcgactattttttctaatctcatgcctcttgagccttttactaaaatagtgtctcctgtttttactaattcatttaacttgttaaacacatcttctctattctcaaagtgatatatattggctgaattgaatcctaattgttttgcttcttctccaataaacactgaattttcacctatagttattataatatcagtattattcatagatgattttccaactaatctatgaccatactctgaaatttcacccatttctagtatatctccaagtatcgctacccttctacctttatatcttccaagtatctttaaagcagcatccatagaatctggactagcattatatgaatcattaattattgttaatttttcattttttattatgtctagtctcatttttgtccctttaaaattttttaaacctttttttatataatctaaagaaatatttagacacaaaccaactaatatagcagacattgcattatatatattatgttctcctattgttggtataaatatttcctcttttttcccatttattacacatataaatgttaaactatcctcttccatagtataactttcacaataaatatcattgtttttattaaagccaaatgtttttaacttatatacatgttctttttcttttaatgtagataaaaacttatcatctccatttacaattaaagtatttgtttcatcaaagtttgaagtaatctccatctttgctttcaaaataccctcttgtgaacccagtttttctacatgtgataatcctatattcgatatgactgcaattttaggatttactatatccactaaatattttatttcattgaatccagacatacccatctctattacagcacactcatgttctttatttagattaaataaagtcaatggaactccaaaatgattatttaagtttttttcattttttagtatatttaactttgcagatatggcagagtaaatcatatctctagtagtagtttttcccacactacctgtaacacctataaatggaatatcaaatttttctttatagtattttgaaatatctcctagagccaaagatgtatcttttacctctattaaatttatatccgaactttctaattttattccattactttcattttttataaaagttttacatccactatcatatgcaggcttcataaatgtatgcccatctaaattttctccaactatggctacaaatgcattttgggcacttgcctccctgctatctataactatatcacttacacagtcattataatctccatatattaacttcccattagttgcaagtactaactcttttattgttaagcactccattattaaactcctcctttaaaaccttagctatattctcttagcaacaaaaggcaatgtataccgttatatatacattgcctacgataactcttaactttataattatatactatatttctgtttttttgaagatgtttatgggtatatgttaattatctgttactttttagttttcaaaatatagggttatacttgagtcttcattaacttttactccaggttttgggaatatatcctttacctttgtatcttctggaagttctatatctgcatctaagtctggttttaacttcgcatcctccaatgcctttacagcatctcctatttttagatttcttacatctggcactttaacttgcttcttttcatactcagctttttcttcttctttatatactggtttaactcccaaatattttaaagagtcattcattatttctttcactattggtcctgctgtagtactaccaaatgcacttactcctgttggttcgtcaacaatagcaagaactactatttgcgggtcatcacaaggtgctattccaacaaatgaacatatatactttcctggagcatacttaccatctataactttttgagctgtacctgttttaccaccaagtctataccctggtatatatgctatctttcctccaccttcagttacaactgattctgcaatttctaacatttttttagatgtttctttagatataacacttcttactttttttggttttactgtttcagttatatttcctttattgtcagtataagattttaccactcttggttgcattaaatctccaccattagctattgatgatatagctgttataagttgtattggagttactgatatagattgaccaaatgatattgtagccaattcaactggtcctacatttttttcgttatacagtattcccttagcttctcctggtaaatctatacctgtcttatccataaggccaaatgattctatataatcatacatttttccaacacctaatctgcttcctaattcaacaaatactgggttgcaagagttttgtactgcttgtttaaattcttgtgttccatgaggtctgtaatgtctccaacatttaatctttcttcctccaacagttacactacctgtacatgtgaatttttctccatctttaattactccctcttcaagagcactggaagatgtaataagcttaaatgtagaacctggttcatatgtatcacttactgctggatttctccacatttgataatagccttttattttatctttatcattatatttttcaagttcttcttgataatatggatatattggcgttcttgagtcattagggtcataatctggttttgatgctaaagcaagtatatcacctgttttagggttcatagctattgcagtaaccttttttgcattatttaactcataagctttctgtactgctttttcagtatagtgttgaattacttcatctatagacaacacaagaccattaccttgtacaggctcataatatttttccattccttgtggtatttctcttcctgaggcatcagtacttactataagttttccaggctttccttttaactttttatcatattgcatttctacaccagatatacctgttgcatctgaagaagtatgtcctaacacatatggcgcaaaattcccatatgggtaatatctttgattatcttctgctacccatattccacttaatttagcatctcttatttgacttgccttatcatcatctatccatctttttacttttacaagagccatattttttttgcttattaaagcgtaaatatctttataatcttcatccaaaatctcagctaccttttcagctgcttcttttttatcttctacttccacaggtttacaccaaacagtatacttagttacacttactgctaattctttcatatttctatcatatatagttcctcttttgggttctattggtatatctcttgtttgttgttctagtgcttttgtactcaaccaatttcccttcataagttgtaggtacccagtcctaataacaaggcaaaaaaacaatgcacatgctagaataagaacgagtaccagccttttcttacttatcctctttacttttctcaaatctattccccctagttatccacatctatatactttatttgtccatcttttggatagtccatattgagcaattccttagcctttagctcaatttcttttattgatgttttttcagtttcttttgcctttagttcctctaatactatctctttttttcttaaatctttttgtaaataatagatatcgtacttcatttccgagatttttgaataaccacatagattcaatattattactgaaaaaattgcaatcagtaaaatgcatttagctcctatttttttcttatttctctttttataattattcttttttttatttttatattcatttagattatgtattttataattttttttcaaattctcaccccgatagtatatagtttaaattttcctctatactatatttgttattaatcatatttcttcctctaaaatttcatcgctaaattaatacactattacacaatctaattgtatttttttctatacacaacaaaaacctataaattcacttatacttttatatgaatctataggttagatattaatttctatttatttttatcacttctagtatttttagataatttcttccataaatataatatgtaactaactatctactctctgattcctaagttctccattatattacttaataccatctatatctatatttttatatctaaattttcattatatatctcaataacaaagaacatttcttatagtgttaattgttttttaattgctttaccagttcaacaaaatatataatactttttaattaattatagtaatcttattttatatataagattattctttagccttataactacttatattttttctgctactcttagcttagcacttcttgaacgtggatttacttctatttcttcctcactaggtaatataggttttctagttattattttcacctcagattctttatcacattggcatataggtaaatgttgtggacatatacaatctgatgctaaatgcttaaatgcatttttcactattctatcttctaatgaatggaatgttattatacatattcttccacctttattcattatagaagaagcatcatttatcatctttgtaattactccaagttcattatttacttctattcgtattgcctgaaaagttcttttagctgggtgaggtccatctattctagctttcttagggatagcttttttaattatatctactaattttcctgtagtttctattggtttgtttgctctttcttcaactataaatttagctatacgcttagcccagttatcttctccataatcttttattatcttagttaattcatcttctgtataagtatttacaacatcatatgcagaaaactcacacctaacatccattctcatatcaagtggtgcatcttgcatataagaaaatcctctatcagcttcatcaagttgatgagatgaaactcctaaatcagctaatacaccatcaattttgtaaactcctattttttctaattcctcttttatattttcaaaattgctgtgaacaaacttcactctactttcatattcactcaatctctcttttgctgtgcttatagcatttttatcttggtcaaaccctataaataatcccttatctgacagtttttttactatttctttagaatgtcctgctcctcccatagtacagtcaacatacacgccatctggctttatatttaaattctctatacactcatttaaaagaactgatacatgatgaaattccatagttacctcccttaaattcactttttaaactattcttcactaatattatgtttatttttctttgataaataaacatgtgcaattatgccaccaataactccaattagacttataacttgtgccattctaagtggtcctaacattaaactatctgttcttaatccctctataaaaaatcttcctattgaatataaagttatataagtaactataacttgaccttcatattttttattttttctaaatagtaataaaactataaatattccaaaatcccatatggactcatataaaaaagttggatgtacctttactccatcaaccattattccccaaggtaaattggtagcacctccatgtgcttctccattaataaaatttccccatcttccaatagcttgtgctaaaggcattccaagtataactgtatcagccatttttaagaagttaatatttttaatcttagtgtatatataaccagctaatattccaccaattaaccctccatgtatagcaagtccaccacctctaaaattaaaaatttgagacatattttgagcatagtaactccaattaaatacaacataatagattcttgcacagattagtccaactggaattgctattatagctatatttaatacatcatcatctttaattcccactctttttgcttcttttattgctattaaagttcctaaaatcattccacatgccataagtattccataccacatgatgtctatgccaaacagtgtaaatgctactctatccataacgtcacctctttgtattaattgaaaatatttccaaagcaatatgctataattacaattaattgtaattatactaaattatgataacacattaatgttaattctacaaaaaatattaaaatttattctacaaatccctacactatattatactaatataattactataaaattttttaaactgaatctctcatgactaaagttacaagtgtacatagatattttttaatcaaaaagattgatgcatatatacatcaacctcttctattccttatctatagctcttaaatttttacctcaatttatataaatatattttataaatttgttttaccaaaataaacatttaaaaacataaataatacttaattagttattcttattatgattaagtttctatttaggttctacaatagaaataacacaatactcttctttaaaatgctcttttaatctttcttcaacttcctcaaaagtaatatctttaataacatctaaataatccaatagatttatatccttaaaaacataagatataaaactattacctataaagtttatagaatcaaagcacttaataaatgaccctatttttttctttttagttctctcaaactcttcttttgataatccttctttttttgatttttctatataatcaagaattatttcttttacttttttaggctctttagaatctccagctattatgctaaaagcataatccacttgagacgaaaatccagctccaaaattttcatttattaaaccttgcatatacaaatcttcatagagcttacttccttttttaaataacatccctacaagtatatcagttacaatctctttacgtaaaagttctttcccttttaaaccaacattactatctttaaaacctatgttgaacataggcatagatatagggaatttttctataacctctttttcttttacactttctggttcttctggataaaatctttctatactcttagagagtttgtctactttgtaattgtttgactttttagttacatctataactttttctacatctaagtcaccaacaacaaataaagccatatttcctggattatagaaagtattataacatttatatagctcttccttagttatcttatatatactatcaacagtacctgctatatcaattctagcaggataatttacatacattgccttcaagcaattaaagtatacattccaatcagggtcatcattgtacatttttatctcttgtgctattatacctttttccttttcaacattttcatctgtaaaataaggtgtttgaacatagtcaattagatgttctaaactctcataaaaattttcagtagcagaaaataagtaggctgtcattgtaaaattagtaaatgcatttgcatttactcctaattttgaaaatttatcaaatgcatctcctccatcaggttgctcaaacatcttatgctctagaaaatgtgcaataccttcattcactctaattttcttatcttctccaattggtacaaattctaagtcatttgaaccataattagtagccaaaatagcatactttttcataaaaccccttttaggcataaaatatacatctaatccattttgcaatttctcataataaacttcttctttcaatatatcattaactattttttccatagacatctcctccattaatttctcaagaagtatacagtatcaagctctatattttttatagcttcaactatatctttttttgtaaccttttctatactagatattatgtcttgtacttcagaatttgtctttgccatagactgagagaaaacaaaatcagacataccacctatattatcagttatagatttcatagaattaactaaagcaagtttactgttttctaattcttcatcagatatatcacctgcttttacactttctacttgtttttttatcaattctacagctttatcataatctttagtttctataccagatgatataaacatgatacttttatacttctctattgaagagaatatatagtaacataaactttctttttctcttacattaacaaataatttagagtgtggaccaccacctaagacattgctcccaactactaaagcataatatttatctatgtctgcataatccacatttgctctataacccataactaacttaccttgagttatttccatttgttcatctataacttttacctcatccacattttttataaaatctgctcttggtatatttataatttcttctctttcaaattttagatttttacttattatatctacaactttatcttcatcaaaattaccttctacaactatatctataggtgatgttttaagtatgtttttataatgttcatataactctcttgaagttatactatctatttcatcttcataaccaaattcacttacactatatctctctcctttacacatagcctcaatacatttatcttgcgcatattcctttttatcatttattattgattgtatcttttctcttaaattctctttttcaatatttaaatattcttctttaaacccaccatctacaacaagcgtattatttattacttcattaaaaaattctactacttcttcaaatatactctcatctaaatacttttcacttatgttaattactttaaaactcaatacttgacgttctccacgttttacagcatcagctcccatagatgaaccatataaatcatctaatttattggatattgctctagcactaggatatttagcgcttccacttgctattattgatggtattagagcattttttgtagtttctttttcatccaatagtctctgaacatataaacttataagattcgatttaaacttttctgtttttatcaaagtaagattaatattattacctaaatttattatttttttagtattaaccatatgtacctcctatttttatttaaacatcaattttaaaattgaaatttatttattttttaattatatatactcacatataaaaaccttctatttaattatatcctttttattattttctaaaagcaatatttttatttaaattaaatgcaaatattatttaaatcaatatgctttaaagtctagtttacaagcttgatatatatgatgtataatcaatatgtatgtctataattaaaacaattttgcaatcctatagattgattgtttaaagttatataaagaatataaaaaagaataagagagaggacgattaatatgaaattaggtatagttggtttgccaaatgtaggtaaaagcacactatttaacgcaataactcaagcaggtgcagaatctgcaaattaccctttttgtacaatagacccaaatgtgggagttgtatctgttccagatgaaagattaaacaaactacaagaattatataattctgaaaaaatagttcctactgctatagaattttgtgatatagcaggtttagttagaggtgcttctaaaggagaaggtttaggaaataaattcttatcacatataagagaagttgatgcaatagttcatgttgttagatgttttgaggatgaaaatgttgtacatgtagatggctctgtagacccacttcgcgatatagaaactataaacttagaattaattttctcagatatagagattcttgaaagaagaattaataaaactcaaaaagctgctaaggctgataaaactttaggttctgaacttgatttattaaaatcaataatgtctactttagaagaaagtaagtgtgtaagaactatggaatttacagaagatgaacaaacattcgtaaattcattggatttacttacatctaagcctgtaatatatgcttcaaatgtatcagaagatgatttagctgataatggagaaaataataaatatgttcaacaagttaaagcatttgcagaaacagaagatgccgaagttgttgtagtatgtgcacaaatagaagcagaaatttctgaacttgattctgctgaagaaaagaaagagtttttagaaacattaggtcttgaacaatcagggcttgataagcttataaaatcttcttatgctttacttggtttaatttcattcttaactgctggtccaaaagaagttagagcatggactataaaagttggaagtaaagctcctcaggcaggaggaaaaatacattctgatatagaaagaggatttatcagagcagaaacaatagcctttaatgatttggttgagcatggtactatggctgctgctaaagaaaaagggttggttaaattagaaggtaaagaatacatagttaaagatggagatgtaatattatttagatttaatgtttaaaatgattaatcatatacactttgactattatatataataactaaaaaactaagattataataatacaatattatcttataataattatatagaatttaaaaataaaagaagagtatttcaaatgatttgtataaattattatgaaaaactctttttttgatataataaaattacttacatatataacatttaaatttataaattatctttttattttttaaaatatgtataacacacctatagaaattactattattactatctaaagtattttgctataatcccatatactcttacctcaaaaacattcaaatggaaaaaatactacatattaataaactttgcccaataattcctaaaataatatcctaacaatgatttatgtttttataatagtatatttttacataaaaaagtgaacattgattaacaaagttcacttttttataaatttttatgttataattcacaattttatttaatttgtttcttttctatttaaactatatctatctaatattaatttttcatattcttctattggcattggtctagcaaataaaaatccttgggccatatcacaacctataaaccttaaaaactctgcttgctctacagtttcaacaccttctgaaacaacttttatatcaagttgctttgccatttgaacaatacttgaaactacaatttgactcttttttgcatttcccactgttataaagaattgcctatctaatttcaatacatcaattggcatatctttaagcatatttaaagaagaataaccagaaccaaaatcatccatagaaattttaaatccaacagatttcaaagtttgcattattttaaataatatttttgtattgtcaaatattgcactttctgtcaattcaatctcaattaaatttggttcaatttcatattcttttgttattctttcaagctcagaaataaaacctggattctcaagatgtactcttgataagtttattgatataggaaatgtggggaaattttcattttcccaacgtttaaaatttttacaaacttgggcaaatacaaacatatccaattctgttataaaaccatttttctcaaaaataggaataaatacacctggacttattagaccttttttgggatgttgccaacgtacaagcgcttcagcacctacaattttagtagttgataaatcaaccttaggctgtaaataaactttaaattgttcattttttaaagcatcatgcatttcttgttcaatatcacgttcttctatgagagtttcttttaaattttcagcataaatctcataaacttttaaatattttctttttactgtagtttttgcaatcatagctttgtcaagacaggtagaaatatttgtttctccctcttcaacaaaatatacacctatggatggaattaaattgagttctactcccaaacttgtttttatcattgacaattttttacgtataagttcacatatttctataattgactctctattatttttcttttcaaatattatagcaaaattgtcatttgaaattcttgaaaatacagattgctctttaaatatattcttaattatctctgctatttcctttaatactctatctccttcttcatacccaaacctatcatttactagcttaaacttatctatatcaaaataaattaaaactagattctttttctcatgagaggataaaaattttcctccttcaagattaaatttatttgaattgccaatacctgtaacgttatctttaaaagcaaattcttccaatttttccttactctttttatgtataaatagtatataaattgttaatgccgtaaagattataatcaacactacacatgctgataatgtaagttttataatagcgtatgatttctcagatatagcagttttaggaacttcagaaaaaagataccaatcattgattcctattggggcataacttaaataatatccttttccaaacatactataacttaatgaacctgatttaaagttttttatatttgacttcatattattgatactagattttgatattgaatcacttctgccaatgtaagaaaataaattttctttagtagagttggcgtttttgctgcttggatttaaaacaatattaccattacttctagctatataagaatatccttttccattaaatgtaggtacagaaagtattttttcatacaacttcgtactatgtgtggcaaatataactcctttaacctcattatctttataaattggcacagaatatacattaatattactattggtatttttatcatcttctattacatcttttaatttttctgttataaccacttctccttgcattgattttaagaaataatctcttttagagaagtcttctatataaccatctgtagtgtatgctgtaccatttggtaaaataactcccattcttttaaatgaactattaatagcttgtctttttagtatagaaaggatattatctacttcaaaagactcttctccctcaataaatattgaaattgactctagtaactttatatctccattaatttgtttttttaacacattgacgctttgatttgctatttctgaaagatattgattcgtttcttcacctaatgtcttattcaaccttgaaccataaatcaaacaggaaattgtaattactaagatacttatgacagcaattatggacaaaccatacctattattttttgcatcacttaacattatgcttcctgcctttctcgaatctatgtatgtataatcattatcttatgacaattattgtaaacattttataataatacttatttttccatatttactgtaattatacaaaattataaactttattacaacaataaattaattaatatagatattagggtttatattattgcattatctattttacaatcatttacatataaaaaaatgtaatatcaaagtgaaacttgatattacatttttgttcttgtattttgtttaatttttatgctacattttacttaaacactcatttgcaacttctttatcatcaaaatgatgcttaactttacctataatttgataagtttcatgtcccttacctgttataattacaacatcatccttttttgccatacttatagcttctgctatagcttgttctctatcaacaacaacatggtaattttcttttttcttgtcaattccttcaagtatatcttttattattgcctctggttcttcagttcttggattatcagaagttataatacataaatcagaatatttttgtccaattgctcccatcaaaggtctcttttcagtatctctatctccaccacatccaaacacagaaattatttttccttctgcaaattgttgagttgtctttagtacattttcaagtgcatcaggagtatgagcatagtctacaattacacttatacctttatcatttggaactgtttcaaaccttcctgatactccattagaaagtctaagaccttctttatatattggtttaggtatgccaagtacatagcaagcagctataactgctaaagtattatatactgtaaacattcctggaactggtataaatattacttcttcatatgaaggtgttattaatctataagatactccatccgaatctgattttatatctctagccataaaatcagccttagtatcaacaccataagtgtaacaaggtacatttataccttttatattttcatatatcttttttccaccttcatcatctatgtttattatatttgccatagtagtcttaaaaaataatttttcttttgcttttctataatcctctaaatctttatgaaaatctaaatggtctggtgttaaatttgtaaatatgcctagtttaaagtctgtttcatcaactctatttaatgccaatgaatgtgatgaaacttccatcgcacagtagtcacatccattatccaacatattattaaaatgatattgtaaatctatactttctggagttgttgaattggaaacaatgtctttttctccgtcaaaaatttttatagttcctataagtccaactttattcttatttaaagttaatatctcatttagtatagtagttatactagtttttccattagtacctgtaactcctataacgttaaatttctgagatggatgattataaaaattatcagctacttttgccatatcttttcttgtatcttttacctttataaatgtacatccttttatttctacatcttcttcaacaagaaatgcacttgctcccttttctatggcatcttttatatacttatgaccatctgacacaaatccttttatacatataaataatgtaccttttgtaacctttcttgaattatattgtacattattaatatctatatttaattcacccttgacattgattatatccaacccctgtataatatcatttaatttcataaatgctttcctccctttaaactctttctgctaaaattacactacatataatattatattaagaattttttactatgtgaatggttaaaaatgcttgaaatattgcaaaaaatgctctataattttctataatataactgaggaaaggtcttctataaaaactatggataataaaatcgggtacttaaacgataactttaaaatatttaatattagagataaaaaagatatacaatttgaataccataatcatgattttaataagataattatatttataaatggaaatgtaacttattttgttgatggtattccctataaactaaagccttgggatatactctttatcagcaataatgaaatccataaaccagttatagattcaaatgtcttttatgagagaattgcaatatggattagcccagaatttatgaaaaaaaatagtgatgctactagtgacttagaaaaatgttttaaaatagctacggagaataaatgcaatagattgcgtttaaatatacatgatattgaatctattaagagttttattgagcaaataaatatttccgaatccaatactgaatttggaaatgaaatattgagaaatgcattatttatacaacttatgatattcttaaacagaattttcctaaaaaatgaaaatatggaatcaacagaagacgttttttatgatgaaactattaagaaagtattaaactatataaattcaaatatagatgataagctttcaatagatagcatatcgtctgaattttttataagtaagtattatcttatgagaaaatttaaatctcatactggaacgtctatacacaattatatagttcaaaaaagattaattttagcaaagtcactaataaccaatggttaccttatgagtgaagtttgtaataaatgtggattcaacgattattctagttttgtaagggcatttaaaaaaaactacggtgtatctcctaaaaattatataaacaataaaaatcctttagatattactcttttagatgaatagataatttatgtaaattttattttaataaaaacttgaagtattagtgtatttatcttactaatacctcaagttttttaatgttttaaaatatatcaaaatataatgatatatatttctattacttaaaatatatattaaataaattgcatgttaactgaacctatttatatatttattaaatctcacataacttttagttatactatcatatagctatcctattttttcaatatcatatcttaatatacttactctgttctcctcttttgctgtagttattccttttttaatgcttaatttctgattttgttctaaattcgtaaatactacaggacttattgttgatagacaatttttttcaatatattctaagtccattttaactaatttttctcctgcttttacttcatctcctacattcacaaatacttcaaatccatttccttctaaatttacagtttctatccctaaatgtataagtatttctactccactttttttggattttattattattgcatgcttagttggaaatataactccaatagttccatcaactggtgaataaatcaatccatcactagatttaattgcaaatccatcccccatcagtttacttgaaaatacagaatctggcacttcttctatatctaatatctctccatttgttaatgaatcaatcttttctactaaagcattttccatattggcaacttccatattttttttcactttatttttatcaacatttttagtaacagtactttcaacctttgtttttccctctattatatcttttatatcagactttattgaatccgattttggtccaaatatagcttgaacattgttgccaataaccataacacctgctgctccaagtaatttcaatttttctttatctactttatttatatcatttacaaccaatctaagtcttgttatacacgcatctaggctctttaagttgtctttatttcctaaagcaattaaaatctctgatgctaattcattcttagacatttcaatgacttcagcgttagtttctgactcatcttctcttcctggtgtctttaaattaaattttcttatcataaatctaaatacactatagtataatactgcaaaaccaatacctaccaagatagccaagtaccatggagttctattaggaagaacaccaaataataagaaatctattaatcctcctgaaaatgtgaatccaattttaactcctaataattgcataattgcgtatgataaacctgaaaataaacaatgtattgcaaataatactggtgcaacaaataaaaacgcaaactctattggctcggttattcctgttaaaaaagaggttaatgctgctgatgccattatacctgctacaaattttttcttttctggctttgcttcatgcaccatagcaagagctgctgctggaagaccaaacatcataaatggaaatgcacctgtcataaaagtacctgctgtgaaatttactccatctttaagttgagcaaagaatatcttttggtcacccattacaagctcaccagctttatttacatattctccaaattgataccaaaatggattatggaaaacatgatgcaaaccaaatggtattaatagtctttccaaagaaccttccataaatgctgctagtgtttgatttgcttctataacattttttgagaaactaagtaatccctcttgtattggaggccaaataaaagacaatataattcctattgctatagcaactaatgaagtaacgattggtacaaatcttttacctgcaaaaaaacctagatactgaggtaattcaattttataaaactttttataaagataagcagccactatccctataataataccaccaaatacccctgtttgaattgttggtattccaacaatacttgcatacatagaattgtctaccatatcttctgtaacacccgccataacacccatagatgtattgagaattaaaaaacctactatggctgccaatgctgcaacaccttctccttcagttaaaccaacagctaccccaactgcaaatataagtggtaagttattaaatataatttgacctgaactttccattatacttattataagttgaaatgtaggattcgccaaagctggaaaatgagacaacaatgcgtctcctgctaaagcattactcacgccaagtaatatacctgctgcaggaagtaatgcaactggtagcattagagattttcctactttttgtaaaacaccaaatacttttttcatttacttttctctccttattattttatatttttttaaataaaaaagacttaagtttataaaaagttacattagtatacttaattctaaaattaaacttatgttaatataaataaacctatattaacctaatttcagaattaaaaataaactattataatttttttataaacataagtcttgcctgcattatcagtaacaatcttaatgttttaaaattattattttatattaaattttaaataatatattaaaattaaacataatatattaaacctatacattctgtattaaactactctttattataaattcagtacagatataactcttttgatatgtaatgttaaataaagtagttcatcttgacttacatagtaatcataattcttttctacatgagtttttattttatatgcacaatcataatccttttcatactttactttaattatatctataatttcattatttgtatcattgattttttctttttttactaatcgttttgcaaagaattttaaatgagtcaaaagcctatcataatttatatcatcttctttaaattcaactctataataatatcttataatatttagtatgtcttttacaattttagtaattaacagtgattcctttgaacttcccttatagtttgaatttactatatgcattgctataaaaccagcttcatctactggaaatttcacatcaaattctttatttatataatctacagcccatttaccaatctcatattcttttttatgtattctttttatctcatgtagtaaatcattctttatagttatattttcatgatatcttttaattgcaaatgcaatatggtcagtaagtgctacataaatatattcataaagcttagtattcaaattctcctctgcataagcaattatttcagtactaatctcaaaaaatttctcatcaacctggcttgctagtttgctaattttatctaaaaagctttcatcttgtattacaaaagttctttcaattttacttttatctatttcttgacctttctttttttgaaacccaatcccacatcctgttagtattaattctttttttatattttcatctaaaactaatacaacattattattataaatttgttgaataatcataatcaatatctctcccaaaatacaatttcccttattcataaaaaaatacctaaattaagatacaattcacctgtataccttaacctaggtattgcctgcttaccagtaacaatccagcttgttaattcttatatattgtattcaatttatggttttattctattataaataaatatatatgtcaagtaaattattgaaaactatttcctattttttagtattatttttaacatcaaaaatcaaattttattccattatatttatgattctatcatcatcatttaataaagattcaccttcaagtatactcatcatatttttaggaaaatttaatccttgtgtgattgattttactgctactaaatcagttgaagatattactgctgccaaagcaagtgaaacagataatggcatcctaggaataagaaaatgtataaagattccacctgcaaacacggttatcaaaactaaaccaaatgcaagaagcaaaattggttttctaagctctagtaactcttttcttgatacattttgtccttcactgaataataatggagctatgatacatattacaaatatttctggattaaatgaaaatgataatttaaacggcaaaatagacaatataatccctagtacaatttgatatattgcaagaggaatattactccactttttgctaaatacagttgaaatctttgtacaaaccaataatcccaacaatgttactaaagttgacataactacctctcttttcaataataatattataaattaaacttatatatcaactaacttaatattaacaacatgaaatcccatcttaatcaaaaaaattttcagtttattctattattcttattatatacatcaaatttaatttttgaaatatctatactagatggcatgcaacaaaatgatttcttgatatttcttttaaaactggaatctcttttttgcatatttccttacaataagggcatcttgtatgaaacttacatccacttggtggatttgttggagatggtatgtctccttttaatataattctatttttcttaattgtagggtcttgtactggtactgcgctcataagtgctcttgtatatggatgttgagaatgtaagtaaagttctcctttagttgcaatttctattatagaacctagatacataacacaaactctatgtgcaatatgatttactacactcaaatcatgagatataaataaatatgagagtttatatttatcctgtaaatccataagtaaatttataatttgagattgaatagaaacatctagtgcagaaacaggttcatcacaaactataaattctggatttaatgctaatgctcttgctatacctatcctctgtctttgacctccagaaaactcatctggttttctatttaaatggtacttagaaagaccacaactttctacaacatttaatatattatcttttatttcattctttggcactaaattatgttctataactgcctctgatattatttgttccacatttaatcttggatttaatgaactatatgggtcttgaaatatcatttgcattttgggtcttaactttctaagttcttccttctctaacttatatatatctacaccattaaattcaactttaccttcagttttttcaattaatctaaggatggttcttcctgcagttgattttccacatcccgattctccaactatagccaaagtttctcctttttttaaatcaaaagaaattccatctactgcctttacacatttaatttccttatcaaataatccagatttaacttcaaagtactttttaagaccttctacttttaataaactctcttcttttttcaattatatctcctcctttttatataaccaacatgcaatactatgaccactattcaattctattaaaggaggtatctgagttctacatttatcacatactttttcacatctatcactaaaataacatgaatctggtattccaattggatttggtacttgtcctggaatcgaatacaatcttttatctttgttttttccaagaacaggctttgattttagaagtccaatagtataaggatgttttggatttttaaataattcaacaacctctgccacttctataattttaccagcatacatcactaatactttgtcacacatttctgcaactactcccaaatcatgtgtgatcatcattatagatgtgtttaatttttcttttatatttttcattatatctaaaatctgagcttgaatagtaacatctaaagctgttgttggttcatcagctataagtaattttggattacatgataaagccatagctatcattattcgttgtctcataccacctgataattcatgtggatatgaattatatatttcttcagctcttggtatttctaccagttttatcatatcgattacctttttcttagcttcttcctttgataaatcttgatgtatcataataccttcaatgatttgacttccaacagtgaacgctgggtttaaagatgtcattggttcttgaaaaatcattgatatctcattccctcttattaccataagttcatcttcattcatctttaaaatgtctttgcctcgaaagattatttctccaccttctatttttgatgttggaagtaacttcatcaaagacatggctgttacagacttaccacatcctgattctccaactattccaatagtttcaccttcatttatattaaaacttacttcatttacactctttacaatccctttatctgtatgaaaataaacttttaaatctttaacctcaattagtgctttactcattattttctcctctcagcaaaattacttaaaataacatacaccttttgattgtattttataaaaatttaaattacaacattttcttacattttattatttttttctattaattataataatataatagttaatttctatatatattgatttaataatgattactattatacaatgaaaaatatgtgttaaatattattttatggaggttttataagaatatgaaatttaaaaaattggcatcattaatcttagtttcatcattaatgcttacatttacagcctgtgcttccaatgataaagacaagtctagtggaagcaaatctggtggaactgttgtaatacctatggcaagtgacccagatataatcaatggagcttttgcaaacgttaaagaagactctcttgcatcaaatatagtttatgctcctctttatacttatgaaaaagggaatttagtaaattatttagcagaaaaagtagattttaaagatagtaaggaattaactataaaattaaaatccaatttaaaatggcatgatggaaaaccaataactgctgaagatgtcttatttacatttaatacagttttagacgaaaaacaaaattcaccatcaagacaatacttattggtgggtgaaaaaccagttaaagtagaaaaaattgatgatttaacagttaagattactttaccaactgcaagtgaatctttcttatatggtatatctaaaatttctccaataccaaaacatgtatttgaaggagaatcaaatatagctaagtcagaaaaaaataataatccagttggttctggtgcattcaagtttaaggaatggaaaaaaggtgaaagcatagtatttgaaaagaatgcagattattttggtggagaacctaaggcagattctatagcgctaaaaataattcctaatgaagcatctcaagaagcagctttaaataatggcgaaatttcacttatgaagacatctgctgaaggatatgaaaaggcaaaatcaaactcaaacttacaaacttatacttatagtgaagaaagattaaactacattgtatttaaccaaaatatatcaaacatggctaacaaagaagtaagacaagccttatcatatgccttaaatagaaatgaaatgatagaatcagcatatggaaaagaaggttctgtacctgctaaatctatattagttccagaagcagacttctatacagaagaaggtgttgaaggatatgaccaagatacaaataaggctaaagacttattggataaaagtggtgttaaaattgataaattaaaaataggttataacacaggtagatttgggcataaaaactatgccttagtagctcaacaagagttgaaaaaaattggtatagaagctgaaatagttccttatgaaagtaaggcattctttaatatactatttagtaatagcactgaatgtgatatgtatgtaaatggttatgcttggggattagaaccaaacccatatagaggtatgtttgaaactggtcaatattgcaaccaaactaaatattctaatgctgaaatagatgctttatgggaaaaaggatttactgagttaaacaaggaaaaacgtaaagaaatatacaaacaaatacaacaggatatatctaaggatgcacctatttacactatagattatgaacaaaatttaatggcagctcaaaaaaatctaaaaggaataaaagatgctaaaccatctcctgcaatattatttgaagattggtctaaactgtatgtagaataattgatgtaaaattttatattattaattagaaaaggagatgtctaaaaataatattgttttattattttaaaacgagacatctcttttaattaggagaatttacttatgttaaaattaatattgaatagagtaaaagttttaatacctatgttaatcttaatatctatattatcatttggacttttagaattagctcctggtgacccagcagatgcatatataaatcctttaatgtcttcacaggatattgaaaatataagggttaatatggggcttgataaaccagtatatataagatatttaaactggttgaaaaacactttaagtggaaacttaggtatttcttatataaaccatatgcccgttacagaacaaattatggaaaaaatgggaaatacatttattcttatgggtacttctttgatattttcaatattggtagctatacctcttggaatatttttagctgtaaataaaaattcaataactagtaaagtatcatctgtttttaattatataggtgtttctatcccttctttttggataggtatgatactcatttcaattttttcagttaaacttaacattttcccatcaggaggtatgcatactattggaaatgatagtattggagatttagtaaaacatttagttttgcctgtaataactttaggtctatataatactgctatttttacaaattatgtagaagctagtgtaaatgaacaattaaaaaaacaatatgttattacagcaagagcaaaaggattatcagaaaaagtcatactatttaaacatgtcttgaaaaattcactgacatcattggttacaatcctaggcatgagtatacaaaaattagtcactggtgcatttgttacagaagtagttttctcttggccaggtatgggaagattaatgattgattcaattttttcaagagattatactgtaattatggcaataactatgttatcagcactatttttaattttaggtaatttagttgctgatatactatacttattaattgaccctaaaataaaatctagcaaaggaggattctagttgtgtttacaagtatcttaaaaaaattaaaaaaagataaatcctttgcttttgcatgtattactcttagcataataatcatattaattatagcttcttttatattaaatatagactctaatgcaattgatactacttctaaacttcaagaacctagcttaaagcatatctttggtacagacgaacttggtagagattacttctctagagctctttatggtggaaggatttcacttagtgttggtattttatcaatgcttatctctgtagtatttggtactgctgtaggtgttattagtggatatattggaggtaagctagaccaattcttgatgagattagtagatatgcttatgagtataccaagtttcttagttttgattgtattaaatacttatctaacacctaaagtttccactattatactaattattggattcttaagttggatggaagtttcaagaattgtacgtggcgaaacattaaaaataaaggaaaatgaatactgtttagctgctaaagctactggtatcaagactagaaatatactattaagacatatagttttaaacttaaaagagactattgtagtcgctggttcgttaaatattgctaatgctatcttaactgaatccgctcttagttttttaggtcttggaatccaattacctcttgcatcatggggtaatatgcttcaagatgctcaaagacatatttttgacaagttatatttagctgtatttccaggattacttatatttttaacagtcataagtttgactataataagcaaaaaattttctagtaatacttaacaaattttatatagaaaataaaaacagtgattatctaaagatatacactgtttttatttttcgtttaaaaaatacatattttgtatattataactttaaatactactctaccatgttatgtaaagcctattattgctctcaaacatatagatgaaaaactaatagtttattgtaataaaaattgatttatttatttgttattttaataacatttttaagagttctttttactaaagaaatctataataaatttaaatacatgttggtctacatggctataacgttcttttttaggtctacatagtataactttccatgtaataggatgattaaaaggcttttctataattttgctattttcaaaaaaatcatgaactggtgatggtaaaattgttataaaatcagaatttgtggttgatagcaacaaaaaatcccatgaaccagacattatatatctttttaacttaacattttcatcagtaaatttttgcattagcttatgatgtatcataaaagtaggattaaatattgcaagtaattgctcattcaaatcgttccaatctatcttatccttcttagcaagtggatgatttatatttaaaaatgctgtaagttcatcttcttgaagcacatgttcagttactacacttttatcaattttatgtggatgtaacagtactgcataatctagttcctgcaagataagcattctatttaagtcatatgcacccttctctactatatcaaattctatatctggattatttgcaactaactgtgcaactacatctgaaaatgctattccaagtataagtggaggtattcctattctaacttttcctttaaattgaactgaatcttctcttaaatcttccatcatatttttgtattcatttataatatgttctgcatttacataaaatctttctcctgctggtgttaacccatttaacctacctttatacctttcaaataaatatacatcttcactttcttcaaaattttttataatttgacttaatgctggttgagatatgtgaagtgtcttagatgctattgataaattaaaaccagatttcactatttcaacaaaatatttcaactgttttatatccattttaaacccccttccccaaaagtataatttagattatattttttcttctaatgatattttataggaaaatcaacataatttcattaatattttaacaaaatatttttctaaatctactataaatttttatcctataaatttttcttatacactatataaaaaattagacttagacaaaatgcttttttcgccgtaatctataattagaaacaggaaaacctaaagcattaggaataaaagtaattgaaatacttaaaaacaagcttgtattaaaaaagtactttattatagtgttccctaatttctttattcagaaaatttttaattatcattcaagaaaggtaactattagatatgaaagatgtagtaatcgtatcagcagtcagaacacctataggaagttttggaggtgtatttaaaaatacttcagctgttcaacttggaactatcgctgttaaagaagcgatatcacgtgtaggacttaatttatctgaaatagatgaagtaataattggaaatgttcttcaaacagggcttggacagaatgttgctaggcaaattgctataaattcaggtataccaaattctgttccaagctacacagtaaataaattatgtggttcagggcttaaaagtgttcagctagctgcccaatcaatcacatctggtgaaaatgatgtggtaattgcaggtggtactgaaaatatgagccaagctccttatatcgttccaactgctcgctttggtagtaaaatgggtgacataaccatggtagatagtatgctaacagatggccttattgatgctttcaatcagtatcatatgggaataactgcagaaaatattgcaactaaatttgaatttactagagaaatgcaagataaattggcattagaaagtcaaaataaggctgagaatgctataaaaaacaaccgctttaaagaagaaatcgttccagtagatgttttaatacgtcgaggaaaaatagaaactattgataaagatgaatatcctaaattaggcatgacatttgaaggtttagctaaacttaaacctgcattcaaaaaagatggtactgtaacagctggaaatgcctcaggtattaatgatggtgcggctatgttaatactaatgagccaacaaaaagcagacgaactaggtattagaccacttgctaaaataaaatcctatgcttcagctggtgttgaacctgaagtcatgggtactggtccaatccctgcaactagaaaagcactgaaaaaagctggacttagcatcaatgatatagacttaatagaagcaaacgaagcgtttgctgcccaagcattagctgttaaaaatgaacttcaaatagattcatcaaagttaaatgttaatggtggtgcaatagcattaggacatccaataggagcaagtggagctagaatacttgttaccttaatttatgaaatgcaaaaacgtaaagttgaaactggacttgcaacactttgtattggtggtggtcaaggaatatcaatggtggtttcacgataggaggaaatatgaataaaatagttagcattgatgaagctctatctcatgtaaaagatggagatacaataatggttggtggattcatggccaatggttcaccagaaaatttaattgattatttatgtagtaaaaatataaaagatttgacactaatttgcaatgatactggctttattgacaaaggagttggcaaaatggttgtaaataagcaatttaaaaagataattgcttctcatgtaggattaaataaagaaactggaagacaaatgaacaacaatgaaacagatgttgagttagttcctcagggaactcttgctgaacaaatacgtgcagctggttatggtctaggaggtatactcacaccgactggtattggtactcttgttgaggagggaaagcaaaaaattgttgtcgatagcaaagaataccttcttgaaaaaccaatttatgcagatgttgctcttctatttgcatcaaaggtcgataaagcaggtaatctagtttataaaggctctatgaacaattttaataatttaatggcatctgctgccaaaattacaatagttgaagcagatgaaatcgttgaaattggtgacattgacccaaatgaagttaatacaccaggtatttttgtgaattacatcgttgaaggaggtaatttataatggataaattagaaatgcaagaatatattgcaaatagagtatctaaagaattaaaagacggagccgttgtaaaccttggaataggtctaccaaccaaagtagcaaattatattccggataatgtaaacgttatcttacaatctgaaaatggctttttaggtttaggttcagccgaagatggaaattcaagtgatgaaactattgtaaatgcaggtggtcaaccagttactatacttcctggaggatgtttctttgatagtgctacttcttttggaataatcagaggaggtcatgttgatataactattcttggcgcacttcaggttgacaaatatggcaatatagcaaactatatgattccaggtaagatggttccaggtatgggtggagctatggacctagtaactggagctaaaaaagttattgtagcaatggaacatacttcaaaaggttctgcaaaaatattaaataattgtactcttccacttactgcaacaaatgctgtagatttgatagttactgaaatgggagttatggaagtaacatcagatggaattttacttaaagaaataaatccagctttcacattagatgatgttatttctgctactgaagctcctttaatattgtcagattcattaaatggaaaaatatctgttgtttaaaataattaaaactagaaaataaaaatctcttagacgtattacatataaatttgtattgcttaaaatattaatataaaaataaaataaaattggaggaaatgaaaatggttaaagataaagttgtattcgtaacaggagctgcaagtggaataggtaaacaaatagctgaatcgttcttaaaaaatggtgctaaagtaatgttctctgatataaatcaagaagctttaaataataccataacagagttacaaaaaaaaggttatgattgcatgagtgtaaagtgtgatgtaactaaggaagaagaaattaaccacgctatagataaaactgttgaaaagtatggcagattagatatattaataaacaatgctggacttcaacatgtttctatgatagaagatttcccaactgataaatttgaatttatgataaaaataatgctgacagcaccttttatagctactaaaaaagcatttcctataatgaaaaaacaaggctttggtcgtataataaatatggcctcaatcaatggtgtaataggatttgctggaaaggctgcttataactcagcaaaacatggacttattggactaacaaaagttgctgctcttgaagctgccgattctggtataacagttaatgctttatgccctggatatgtagatactccacttgtcagaggtcagtttaatgacctttcaaaaactcgtaatataccattagaaaatgtcttagaggaagttttgtacccacttgtaccacaaaaacgcctattagatgttcaagaaattgccgactatgctatgttcctagcaagtgataatgctaagggtattacaggacaagcttgcttactagatggaggatatactgcacaatagttattatatttagggcttgaagaaagtattcttcaggtccttctactaaggagggatatttatgagtattatcgcaccaattggtataattattggtatcatagctattatatatttttcagttaaagaaattcatataactatagctgctccaatagcaactttaatagttgttctcttaaataaaatggatgttgtaacatcaatgctaggtgctgacaaaaacaattatatgggtgcacttggaaactatataatgagttattttgcaatattcttattaggctcaatacttgctaaatttatggaagaaagtggagccactgtatcaatagctgattttattttaaataaagttggctctaatcatccttatagagttttagttgctatatttatagtaagttttatattaacgtatggtggtataagcttatttgtagttatgtttgcagtcattccacttgcaagaactctatttaaaaaacttgatatttcttggaaccttattcagataccactttggcttggtattgcaacaattactatgactataattcctggaacaccagccattcaaaatgttatacctattcaatatctaaatacgtctcttactgcagctactataccaagtattgtaggtagtataggttgtgctacgtttggacttgtctatatgaaatatgctctaaacaaaagtattagaaaaggtgaaacttacgcaacttacacttcaaaattagaagaagaatctttagatagagaattaccaggattttttgcaagtatttttcctctattagcactcgtaattatagctataactggaagtacttttggttcagaatttatgaaaaaaaatgtaatttacatagctttaatagttgcaattcttttatctgcttttttattccataaatttctatcatctaagatacagacattgagcataggtgctagtggttctataggtcctatatttgctacatcttctgcagttgcatttggagcagtaataatggctgcacctggttttgatgtatttagcaaacttataatgtcaataccaggtagtccacttataagtcttactgttttgacttcaacaatgtcagcaataacagggtcctcttctggtgcattaggaatagtaatgccaaactttgcagattattatttaagtactggtctaaatccagaattaattcaccgtgttgctacaatagcctcaaatatactaactatagttccacaaagtggtgtttttcttacattcttaagcttatctaagttaacacataaaactggatttaaagaaactttcattgtagttgcagttggttcactaatagcagaaattattgtaattacattaggattactaatgtattaatataaaacaaattaaaattcataatatgaaaggtggtgtctcaaagtgaactttttacttaatgagacactctttttgtatgaaatcaaatatattttaatcatttcaacaataaaaaagaacctttctctattttgagacaaaccctttttattccttaaagatttaaacaattataatttgttactaatacgaaaacatctattgaataaatttaaccaaataaaaaaaaatttatcataactataaatttacgttatggaattattataaaaatattattttctctaagtaagtaattccatactatacaggcttttaatacaaattttcaaacacactgaaatatacctatttattccatatatatcttttttacatatctttacagtaaaaaaagtcttaatcttatgttagtatagattcacgggtaccccctacactaaaggttacaaatcagtaacatttttagaatttttagattaagaggtgtttaatgatgagaagaaatataccaacaaaattaaaaactatattagctttaggagtgttaactttagcaacagcttcaagtgctgttactgcaagtgcttcatcacttgaaaataatgtaaatataagtaacaaaagtttagtatatagtaatactaaatacaagttttctgcaaaaccaaattgttctgtaaaaccagaacttaaacctgataaagataactcttgtaaggataagaatcataatgacaagaattgcaacaacactaataaacctgaggacaacaataattcagactctactaataagcctgataacaataaaccagagtctaataaacctgaggacaacaataattcaggctctactaataaacctgataacaataaaccagagtctaataaacctgaagacaacaataactcaggctctactgataaacctaataacaataaaccagagtctaataaacctgaagacaacaataattcagactctactaacaaacctgatgataataacaactcaggctctacaagtgaaaatttttcagcttaccaaaaagaagttgtcgacttagtaaatatagaaagagctaaagctggattaaatcctcttactcttgattcttctatatcaaatgttgctacaaaaaaatctcaagatatgattgataacaactatttttcacacaattctccaacttatggttctccatttgacatgttgaaaaaatttggaataagctataagacagcaggtgaaaatatagctatgggtcaaaaaactcctaaagaagttgtaaacgcatggatgaattctgaaggtcacagaaaaaatataatgaatccaaatttcagtaaaataggtgttggagtagcacaaaaaagtggtggttcaatttattggacacaaatctttgtaggataaaatactctttttccatgcatatcaaaagagtatctctaagtgataaaaaacacaaatgagatactcttttgtatctattttaaaattatcaaatccaaatatacatactataaatattatttgttctcttaattttagtgtgtagaacaatatataaaaagtattggcaagatgaaaatggaaaacttaaaaagatatttaataggtaaaaacaggatcttaatatcttcataaaaaaaggctgtctcaaaatagagataaggcctttttcattgttgaaatgattaaaatatatttgatttcatacaaaaagagtgcctcatgaactaaaaagctcactttgagacactctcttttatcaattctatataagcattataatactttaatattattcagctaattttttgtatccttcatatctttctttagcatcagcttcagctttagcaaataatccatcagcttcctctgggaattgtttagctatagcagaatatcttacttgtgcaagtatgaaatctttgaagcttgcagttggttcttttgaatctaaagtgaatgggtttttaccttcagcttttacttctggattgaatctgtataaatgccagtatccgcaagcaacagcttgtgcttcattagccacagttcttcccataccttcttttaatccatggtttatacatggagcataagctattattagagatggcccatcatgtttttcagcttctaaaacggctttgataaattgatttttatcagcccccatagcaacttgagctacatatacgtttccatatgtcatagccatcattcctaaatctttctttctagattttttacctgaagcagcaaacttagccatagcagcagctggagtagctttagaagcttgacctcctgtatttgaatatacttctgtatcaaatacaagtacgtttacatcttcaccagatgcaagaacatggtctaatccaccgtaaccaatatcatatgcccaaccgtctccacctagtatccattgagatctcttaactagataatcttttctatcttttatagcttttactaattctttagctttttcatctgtacaatcacaagctggtttttctaataattcaacaaccttagcacttgctactttagaagcttctccatcatttctagaatctaaccactctgtaaatactgctttagcatcttcacagatatccatagaaactaactctgtcatagcatctactattttatttcttatttgcttaacagctgtgtacataccaaatccatattcagcattatcctcgaataaagaatttgcccaagatggacctttaccttcatggttacaagtataaggaattgatggtgcagaagctccccatatagaagaacatccagtagcattagctatcatcattctatctccatataattgtgtaactactttaatgtacgcagtttctccacatccagcacatgctcctgaaaactccattaatggttgtctaaattgacttcctttaacagtatttgcaggcataacatcaacttttggagctacttcatcaggatttactgcaaatgcccaattatctaactctgtatcaagttgagtatctattggcttcataactaaagctttttctttagctggacatatgtcagcacagtttccacatcctgtacagtcaagtggactaacttgaattctatattttaatccttctaatcctttacctaatgcttttttagcttcaaatccttctggagcattagctaattcttcttcagtaactaatactggtcttatacatgcatgaggacatataaaagaacattggttacattgaatacagttatctattatccattcaggaacatcaacagctataccacgtttttcataagctgcagtaccacaagggaatgttccatcttctataccattgaatgtacttactggtaagttgtttccttcttgtgcagtcattggtcttagtatattttttataaattctggttctttaacttctcctttatctgcatcaacagcattttcccaagaagctggaacttcaactttaactaaagcatttattcctgcatcaacagcagcatagttcatattaactattttttcaccttttttaccataagctttaactatagaatcttttaagtatttaacagcatcttcttctggtattatttcagctaatttaaagaatgcagattgcattatcatgtttattctgtttccaagacctatttcttgtcctagtttaacagcattaactgtatagaattttatatcatttttagctatatattgtttcatatgagctggtaaatgttcttcaagtcctgcttggtcccatatagtgttaagtacaaatgtaccaccttttttaagaccttttaataaatcatattgataaacatatgattgtttatgacaggcaatataatcagcttcatctattaaataagtagctcttattggagtatcaccaaatcttaagtgagacatagttataccaccagattttttagagtcataatcaaagtaagcttgagcatatttttcagtatggtcaccgattattttgatagcttgtttattagctccaacagtaccgtcagaacctaatccccagaacttacatcttatagttcctttagaagctatttttattggctcagatggagttaaagaagtattagttacatcatcaactatacctactgtaaatccatttttaggttgttctgaaactaagttatcaaaaacagtttttatatctgaaggagtagtatcttttgaacctaatccgtatcttccacctattatcataggagcattttcttttccatagaatacatcacgtacatctaagtataatggttcaccagttgaacctggctctttagttctatcaagtacacatattctttcaacagtagatggcatagcatctaagaaatgtttcattgagaatggtctatataaatgaactttaactaaaccatatttttctcccttagcatttaagtaatctatagtttcttctattgtttctgttactgaacccatagctattaatacgtatttagcatcttctgctccatagtaatcaaataaactatgttttctacctgttaaattactcattttttccatgtatttttcaactatacctactatattttgatagtatttattagaagcttctctagtttggaaatatatatctgggttttgagcagtaccacgagcaactggatgatttggagataaagcattatctctaaatgcttgaactgcttcaaagtttaataaacttgcataatcttcattttctagtaattcaactttttggatttcatgtgaagttctgaatccatcaaagaaatgtataaatggtaatctaccttctattgcagctaaatgtgcaacaggtgctatatcagctacttcttgaactgaaccagaagctaataatacacatccagtttgtctagcagccataacgtcttggtgatccccaaatattgataacgcttgagatgccaaagcacgagcacttacatggaatactcctggtaataactctcctgcaactttatacatgttaggtatcattaataataaaccttgagatgctgtaaaagtagaagttaaagctcctccttgtaaagaaccgtggaatgttcctgatgcacctgcttctgactgcatttcaacaacattaactgtttgtccaaatatattttttcttccttgtgatgcccactcatcaactacttcagccatagttgaagatggtgtgattggatatatagctgctacatctgtaaacgcataggcaacatgagctgcagctgtatttccatcaagtgttttcataaacttagccataatatgtatcctccttgatagctacaattgtacttgtttataacaagtctatttttttatatttacatataatttacacaacaaaaatataaacacacatatagtcgcgcaaatactctatcttctaatataatactacagattagataaaattcctttgaaaattgtaaattaattacatatttaagtagattttttttaaaattaaatatgttaagtttttttcataattttgtatacaatatataataaattaagttagacttttcaaacttttttatctatttgtttacattagtataaaaagtaaaataattatctttattatatgtaaatttttatatatataattttaccatattacatcatatttttgtaagtttttattacattttttataatacccctttattttataaattaatctaatcgattaaatttatcctatagaaatttattacatttaaaaatatgctagcaaataaaatatctactagcataaagtctatttataatattaatcaactattaattctactaaatctccatttttaacgcctgctgcatttccctcttccatatcaacatgcatttctagattaaagctatcactagctcttactaatacattttcaaatactaatgctcttggtccagatgttttaacttttactatttgcttatcagttacaccaaatttagcagcatcttcattgctcatatgtatatgtctagaagcaactataactccttctttcatttcaacttctccagcaggtcctactaatttaacacctggagttccagctatatcaccagattcttttattggtgcttttactcctaatgggaaaccatctgctaaagatatttcaacttgagtatgagctctagctggtcctagtactctaactccctttaaagttccttttggtcctactaaatccactttttcttcacaggcatattgccctggttgagataatggtttaaatttagttaactcatgacccgccccaaataatacgtctatatcagcttgactcaaatgaacatgtttattagataatgctattggtaatttcattgaaattccctccttttaattatttaaattattgcaatacaattatacataatattacctacaaaatcaaattatattgaatcaatatatatctttaaatttttatatattatatctttaaattcttgattatctatataagatacatcatctgtattgtttaaatatatattgtgtaaaagtttagtatttatactcttaaagaaaaaatccataacaatctgtccacctttaaactgtgaatcatatgatttactcccccccactgcaatatacattcctatccgtttcttatttctatcaattgaaggtttatttaatacatatttacttgcatatatagcttgagttctatcaacaacagtctttaatttagctgatattgaatcaaaatgtacaggacttattactatagttccttttgaatcatcaaacattttatataatggcttcatatcatcattaaacttgcaataccctgttttttcacaaaatccacatgctgtgcaatattcaatatccatattgtagatattaaatattttacaacttaacccacactcttctagcatagcttttactttatttgctataaaactgcaatttttattaattcttggacttccatttattattataatctctgtacttttaagtccttttttatcgtttgaatccataatcaatctacctatcctttaacataactattaaaatatcatcatcataattatcttttgatgagaaattctttaaatccaattttagattttctactattaactgttgatttaatctaaaattttcttttagaaagttttctaatctgtttataccatactcttcttttgatgaattttttatctctaaaattccatcagtgtacatacataccattgcataatcttccattgaaagagtattattttcataagtagcatctttcattattccaataggtatgccctttttacaatttaaattattttctattgtgccatctttctttacaactacaggactatagtgacctgcattagacacagtaatcatattttctttagtatctataatacctatcaaacaagttgtaaatactcccatcttgtcaaattcatcatataacatcctatttaaatttgtcattatttctcttggtgtattgtattgattgcataatactttaaaagcaccttttatcattgcaacaacataatttgataccattccatgtcccattacatcagcaacaatataaactatatgttcgtcatccacttttgtagcataataaaaatctccacctactacccttgctggtttatggtaaaaataaagttctttctcatcattacaatccattttacctttatccataataagctgttgttgtttatttaatatgttcaactcattttcaagaactttgtgttttacttccttttcattatgttcatataattgcatcccaacagaaacttgtttggacaatatactaagaatatttaaatcatcactagtatagtttttactatttgcacaaactatacatcctatagtctcatttttatcctgaagtttgtaatatatataactttccaaatttatgcccttttttgagcatggttttaaattatttaggtatccccctaatgactctttctttaaaaacatatcaatcataggatataaatttgttttctttttttgctcaacattataacaactaactatagtatccttattatgatgactatttataattattaaagcttctttactattagtaatattacacgcttgtttacttaaattttccaaaaagccatcaatactcttattaaggtatagttttttagtagcttcatttatggcacttattgagcctcttagtttatcaattaaaatttgtacattattatttttattagttatttctattgataaacttaagagtgatgcaacagatgatataaaatctatatcttgttctgttatataatcatcctcttttaaaaaacaagtcataaatccaacaactacattatttattataaaaggaaaaactattctcccaatataaccttcagcttttgctaaatctcgttcaccttctgctctagaatcttcaaatacattttccacatatattatctttttttcatttacagcctcatgtatatactctggatatgtgtcaaaatcaatttttgcacctttaagactatttattggaaaaatttgaggtacatattctaaggtttgcgaacatactaagtaggcatatttagaatcatttttataaaatagatttacacatgcctttgtagggtgaacaacttctaacattttttctattatgtcatcttttatattaaaaaaatctgtagattccgtcaccatagcggatatctccactaaattcttcattttataactgccattagtcatactcaatttctccccctatatattaaactatttattagtattttaacatacattctttatagtaaaaacaaaaacaacgacaaaactagcaactaatatccagttaaatcctgtcaataatcctataagaagtaatgtaatcaatgcatttagacctgttctccctttttcatccataaaagttattttagagatgtcgatattatttttcacattatttatatgctcttttacttgttcttccatatttcttttatatagtatataaactacaccaattaaaaacactcctatacctagaatcatgtttaaattaaaagctatcataagcagtattgaaccaaaagccaactttaaaagcttaaaaaatacgctatctatctttagagttatatttctgatttctttacattcatctcttaaagaatatccacttgagtctaggttattaatctttgtttttacaatttcagaataaaaaagctttattatcccatttaacattttcatcactcctaaatattttacatatatttgtaagttttacaattataatattttttatacttggtaataataaaaaataacaaatattttatgatttagtatttactgtaaataaattattgaagctttattagttaagtatagatttttaataaatatttttataattagaaggaagtggttttgtgcaaatagaacaactcgatttagaaacgagaaataaaatatactgctatactaaaaaaattcttagaaaatatcaaaaaggcataacatctggaaaattaacagcagataaatttgcagataatatattgtctcaacattttatcagtagtatacttaatgaaaaaatagtcaatgagacaaattttaagatatcttatagaaactatatagaaactttaataaatattcaaaatgaaaatttatctaacttaagaaaaaaatctactaaaactgcaaaatgtttcaatatctctcaaataacccaattaaaaaacttactaagtaatactggttataatttattaattccatataaatacttaactgctagagatatagaaggaatcgttactcttattaatactgggtctattgaacttggaaatgagagaatctataattatatatcaaaagcataataatttaaacctattataaaaaggcaatttatttaataaaaaatatttttaatattaaataaattgcctttttaattttggactaaatactgctatccaagtgctttttctagtttagataaatgttgtattggataatattttagtagctctttaaattgttctactgataaaccttctgttgttgtatatattcttattttttcatctaagtcactattaataaatttgttttttaaatcctcaaaatttacactactcattttacatcactccttatgtaacatattcatttgtattattttatccaaatacataaaatttattacataaaaatatatctatttaataatttaataaaaaaaagctatctcaatttagaaattactttctatatttgagatagctctagctaaactaatagccaatagttataaataattatttataactatctgttgctttttccagccatttgttgttcagccatttcaactaattttttagtcatgtatccacctacataaccattttctcttgcagtaaggtttcctttatcaacttgttgataattactcataccaagttcattagctatttctaatttcatttggtttaaagcctcttttgctcctggtactactgttctgttgttgttattgttacttgccatgttgattaccttccttctgtttaatttattttgtgttgctgataatattatgtgattttaaacatttttaattcaggtaatttttagcaattaaaacctgccaaatatccagtagaaaaagctatttgcaaattgaatccacctgtatatgcatctatatctattacttctccagcaaaaaataaaccttctactaattttgattccattgtgcttgaatttatttcgtttacttttacaccaccagaagttattatagcttcttcaataggtctgtatctctttactgtaaactttaaattttttaataaatggactaagttttttctctgctctctagaaatttggtgaacaaccgtatttgcattaatttcacttaagtttattattataggtattagtttttttggaagtaaatcatctaatgctttttcaaattttttatttgtatacttctgaaaatctttttgaactcttttatccagtttttcctcatctaatgcaggttttaaatctaataatatagtgtaattttctttccttgtatctttcattctacaacttgcagacttgattataggtccatctaaaccaaatctagtaaattcaagttctccaaaatcactataaactttcttttgtttgctattaaacacccttatttcaacatttctcaatgataatttttctaaatcttttgtaaaactttcttgtacttctataccaattaaagatggttttgtatctataattgtgtgcccctgtgaaattgcaaatttatatccatcaccagtagaaccagtaagtggataacttaatccaccagttgctactacaactgaatcacacttaatttcttttttatcgtttaaaattactttctcaattttattatttttagatattattttttctacttttgaatttaataatatatttactttcttacttttaagttgtctttcaagagcatttacaatatcaaaggctttatcactctctggaaaaaccctttttcctctttctgttttagtctttactccaagattattaaacatacttattacatcatcatttgtaaaagtataaaaagcactataaagaaattttccatttgtaggtacattttctattaattcctctatttcacaagcgttagtaatattacatctaccttttcctgttattgcaagtttttttcctaatttatgatttttctcaattaatgttacatcatagcctttctcacatgcagttgatgcggctatcatccctgctggtccaccacctattattactaccttcttcaaataatcactcttttctacccttaatttttttaatttaaactattgactctataccttaaaatcaatttaattttaaaagtttaaataatgctggagctcctgctattccataaaaaacaactactgtattcttaataaaattcataaaaattatactcatagtagagtcacttatatttaaagtgactattaacattgaaataaacaacttaatgccaatatataacattcctattgttactatcccaaccaaaaacctacatattcttgaaaaaattatatttttactccccttatttttattgctaaaatttatttttttgttattattatctgtattaaatttaacaaatctatcctcaaccatatatccaaatacaaatcctactattataccaaatttttcaaaatattcagggctatttagaaatatagctactattataaatggtataagtaaaactacaagtaaaatataatttttattatcatcaatatagtcaaatatttttataaatataactgtaaaaaatattcctaacatccaacccactatcacatctattggccaatgaacagctaaatacagcctagacaatcctactcctaaaaccataactgcacctattaaatgaagatatctctttttaaatatagtcataatactaacccaaaatgttgttgcagtttgagtatgagcacttggaaaagaataaccaccagcagtagaaactctcaatgattcaagaccttttattcctattggtctgggagcttttacaaactctttgatgcctaaatttacaacaaaatttccaattatagcaaacagtattttctgtccacattttttatttatacaccagtatataattgttgtaattaatattaataacggtgcttctgtgcttattgtaaagacaagaaatataaagttcaaaattggatttcttaaattttggaaaaataataatatatttaactgaatatccatatagatgtctcctttactaaaattttatataattaactaaaaagcactaactcccttagaaattagtgcttttgattcacatttaaatctattctacatcctcaactatacctatataaggtaaatttctatacttttcagcatagtctattccataaccaacaataaatttgtcttctataacaaatccaacatagtctacaggtatattagcttttcttctctgaggtttgtcaagtagagtacatagttttaaagattttggatttctagtttttaaagctgcaactagattacttaatgttaaaccagaatctattatatcctctacaatcaacacattctttccttcaatatctacatctaaatcttttaatattttaactgttccagaagactctgttgagtttccataacttgtaacactcataaaatctatatttacatccaaatctatacatcttattaaatctgaaacaaatacactagctcctttaagtatacctaccactagtaaatcttcgcctttaaagtcttcttctatcttttttcctaattcataaactttttcttttatttgttcttctgtcaacatttttcctgtaactttgtacattttgtatcctcccgctttccttctattaacttatatattatagcataccaaaatatcaattaaaatctttttcatcatttttagacctaaattaacagcttatccatacttttttgctttttccattaaaaatttggaataacgattcctttgtattataatctatatgtacatatattaatcagttatttttatcgattatataattttatttttggaggtacttttatgagcacaaatcatggagctaatttatatagtttatctagtaagtatggcttttcaaaggaagaatttatggattttagctcaaatataaatccttttggtacatcaagtttagccaaacaatacattgtaaacaatatagatatggtatctatgtatcctgaccctgattacatagacttaaaaacttctatatccaattactgcaaatgttctatagataatatagtacttggcagtggagctacagaactaatttcatcatttatacatacaattaatcctaaacaggctcttttactctctccagcctattcagagtatgaaaaagagttatctaaaattaattgttctatagaaaaatactttgcaaaagaagaagataattttcatataaatttagaaaatcttataaaaactatcaatgctaaagattatgatttggtagtaatctgtaatcctagtaatccaactggatttgcatttactaaagtagaagtgagagaaattttaaaaaatacagactcatttttaatgattgatgagacttatgtagagtttactgatacagatacatactcttgtactcaattagttgatgattattctaatttattcgttataagaggtacatcaaaatttttttcaacgcctggaataaggcttggatatggtcttatatctaacactaatgtcaaaaatgaaataaataaaaatctagatttatggaatataaacataatagcttctaaaatgggggaaatcatgtttagtgatttagattttatatcaaatactatttccttaatgaacactgaaagagattacctgcttaaagagcttaagaatataaaaagcttagatatatacaatactaaaggtaatttcatattgtgtaaaatcaaaacaaaggaattaactgctaaatcgcttcgagaacaactgcttccacaaaaaataataataagagattgttgttcatttgaaggtctagatgagtatttctttagagtatgtatattaaaacctaatgaaaataaattattaatatcatctcttaaagcaatttttaaataaaaaaatccctttattttataatttttttataccataaaaaatgagctatctctatttgagataactcatttttgattattaaaaaactaagcactttgctcttctttgtttccttttttactcattccatcatttattttatctactactactgctattgcattatctcctgatacattacatgctgtaccaaaactgtcttgagttaagtataaagctatcattaaacttgcaagcccaccatctgatggtattccaaccattggtaggaaaggaagtgcactcattatagccccacctggtgctcctggtgctgcaaccattgctatacctaacattgcaatataagggaataatacacctattccatgtggcataccattcatcattaaaactgcagttgtaaatcctgttattgatatcatactacctgataaatgtattgttgcacaaagaggtacaacaaattctcttatttgcttacttactccatttttttctgcacaaccaacattaactggtatagttgctgctgaagattgagttcctatagctgttaaatatccaggtacttgattttttaacattcttactggattttttcctgaaaatacacctgctgctgtgaattgacatgccatatatacaaaatgtaaaggtattactactaagtatactttccagaatacccctaatattgtccatacttcccctgctatagttatatttgcaaaagttcctgctatgtataaaggtaataaaggtataatcactgttgacaacgttttcgttacgattccttgaaattcttggaagaaattaaataaagtctctccttttccatgatttcttaaagctgatattccaagtcccattacaaatgcaaatacgattgcagctgttacatctaccataggctctaatggaattgtgaatattggagctaacattcctgcctctgggtctccaatttgacttgcaacacttgcatcaataaaatttgggaagattaatgtagatactgcaaatgataataatcctgctattaaggtagaaccatatgctattcccgtagttatccccaataactttcctgcacctgttgctaaatcagctatacctgctgttacaaaacctataattataaatggtataacaaattttaggaatgctgagaataaggtactaactgttactaatatttgtactattatttctggtgcataacttccgattaaaataccgactatgataccgatgattagtttgggcactaaacctatttttttcttcataatatttaccctccataacttttttaaattaagcattcttgcacattgaatacttagttaaatattggatatccacttattatgataatagagttttacctctccgtcaacaatttaaccattttttgttaataaaaaaaagaataacatatataaattgttattcttcttcatcttttatagaaaattctacattttcaattatatttgaatgtttatctttttttataataactctatacttattaatttcttcattcactatacctatactccaaattaaaactatagcatcatctataaaaccaaatgcccctgcaatcatctctggaattatatcaaccccagatacaaagtaggatatagtaaaaattaatacagaaattacctttattttatcaactatattgattcttttatctgtcataaaatcaggtagtttaagtaaatcaaatacaaaaaccaaaccaaatttagcatttttaaatctgaccaaaattttttttaaaatatctaaaactatattaatgattatttttaaaaactccatatttatcacctcttataattataggttattctacattataaccgatataattaatttgatgaacatattagatataaattttatcaattagtttatatttaaattataataattcaattcctgcactactacaattttgaatcatatcctgtggccatactccaacttgtacttctcctatatgagctttttgtaagaaatacatacatattcttgactgaccaattcctccaccaattgtatacggaagttcgccatttaaaagcatcttatgatagtcaaactcttttctctcttcacatccagcaagtttcaattgtctatcaagagattcttcatcaactctaattcccattgaagataattctaatgctgaatctaaaacaggattgtaaaataatatatccccattcaattcccaatcatcataatcagggcttcttccatcatgtttttctcctgatattaatgtttttcctatttgagttataaatactgctttcttctcttttacaattttatcttctctttccttcggtgataattctggatacatatcttctaactcttgtgatgttataaaagttatttcttctggtaatatttcttttataccttcatacatactacatacaaaaatttcagtatctttaaatactccatacaatctttttacaacatcttttagagtcttttcatttctactacttttatctataaccaattcccaatcccattggtctacataaagagaatgtatattgtctaattcttcattttttcttattgcattcatatctgtatataaaccactaccaacttcaaacccatattttttaagggctaatcttttccattttgcaagtgattgaacaatttctgcatttttattcataaatggtatatcaaagcttacagccttttctccatttaaattatcatttgcacctgtttctggcaatacaaataacggagaagaaactcttataagatttaattcattacttagtctcatttcaaaaaaatcttttaatttttttatagctatttgtgtatcaattacgttcaaactacttttataatcctttggtattattgtgctcatatcattcactccctatatttatatatttttccattaaaaaaacccttcatccctatataaaagggacgaaaggttgcttttccgcggtaccaccctgattagtttgaaataaattcaaacccagctcacaatgtacagatattactcgatacaccccaatatgataacggtttggttccgactaagcctactcttttaaaatttcggttagcaactccaggatgttcttcattatagacttcatattggtctcacaccatcaccaactcgctttaattacattctataactactcttcctttcaaagtctttaagagtttaattcaataaaatttagctctcttatgttttctatttattcataatagtatgataagtgattagttaaaatttgtcaagtttattatttttttatttttaaacactttataaatttttacctatactttataaattttcaaatatagtctttaatctgtccatacattcttttaataaagactgtggacaagctacatttattctttcaaatcctattccttcttttccaaatatataaccttcatcaaataatacattagcttttttaaacattaaatcctcaagttctacttcatttaatccataagcagtaaaatctaaccatgctagatatgttccttctggataaacaagttttacttttggtaggttttcttttaagtattcatcaataaattgtatattattatctaagtaatcatttaattcattaagccagtcttcactttcattatatgctgctattgtagctacaatagcaaagggatttggtgaagttgcaactccaacagctgtaacctcttcttgatatttcttttttagttcatcattattcactattatattagacaactgcattcctgccagattaaatgttttacttggagctatacatgtaattattttatccttgtactctgggcataatgactgtaaaggagtatgtttaaatccttttctaactaaatcagaatgtatctcatcagctattatccataggtcatattttttacatatttctacaaccttctttaattcatcttctctccaaactcttccaacagggttgtgaggactacaaagtatcagtactttattgttgctacacttagctttttcttctaaatcatcataatccatcctataagtaccattctcatatattagaggattgtttacaatgtccctattattgctctttatcttagcttcaaatgggtaatacactggtttttggactattacaccttcattagaattagttaatattcttactaaaatagcaacagcaggtacaacaccaggactaaaaataatatcttttctatttatttcccagttaaatctccttttataccaatcacaaactgcattaaagtatttatcactatcatttgaactatatccaaatattttatgttcaacttttttacgtaatgcttctattattggttctgcacattcaaaatccatatcagcaatccaaaaaggcaaaccatctttttgtgcttttgttgaacaattagttctaaaatcccattttacacaatctgttcctactctatctattactctgtcaaaattatacttactcattttttccctcctaagaataaaatttttataattgttaagtccattactagatgcactttggtattattttacaattcttaatattataataatatcacttttttgtccaatagatttaaaatataattacttttccatcatattttttcaatattccaaaatcagtttcattatatcaaaataagattgctcatattaattattttctaattaacataagcaatctttttctataacttctataattataattttaaatgtagaattattagtttggatattatcccaatctcttttcaaccaatctacaccatatatctacaccatattctaaagctttcgtatcaaatgttacatttggattatgaaatcctggtgtagcatcagctcctaatccaatatatgtagttttacattttagtttttgtgtataataatggaaatcttctccaccagaatttttaaatatacctatagatgcatcagctcccaatacatcttttatagtttcttcagccaagtttacaagttcttcatcaaattctgctgctggtactccatctttggaaattagtacagcttctgcatttatagaacttacagcagtttttacagcatgtattgctttttcttttaattcttctattatatcattactttctgcccttatatctaaagccataaatgcttcatctggtatattattataagtttctcccttaactgatatatttgttacttttatagaatttggtatagctggatttactcttattgcatttattgcattcactgctaaacagacagcatctactgcatttactcctaaatgtggtttagaaccatgacaagtgatacctttaatcgtaaattgcattatacagctagcacaatggtacattgcaggtatcgcctttcccaacctacaatcttgtccaggtcttaaatgcatccctaccatttcttctacatcatccaacaaaccagaatcaattactcttaatgctccatataatttttcttcacctggttgaaaaagtatttttaacttacctctttttactaaatttctctcttttattaactttgcagctgttaaaagcatagaagtatgaccatcatgaccacaagcatgtatcattttcttttctccatctatgataaattccaatgcatccatatctgctcttatagcaaatactggtccttcttttttagaatctatagttactataataccagttcctgcaactcctttattaatattttcaaaccccattttttcaagctcttttaaaacaaactctgatgtcttatattcttcaaatcctttttctggtatagtgtgtagataatcatacactttatgtacatactcaatataatctttgttagttcccataatctagctcctccttaaaatttaaactttccatttatattaaatttttattataattacctatactacgaaataattcattataagcattgcaatacaaccatttaaagttgctataacaaacatatgtggataatatttagtttttaactcagctgttcccaaaagtctccccataaattgtatctgcgctcctgaaagcaataacattggcaatagaattgcaacatgtgcttgacttatttgacctgctgtaaataaacctgcgattactccagatgctcctcccattgatataaatattgtcattatagctgttgctgcaacacctggaagtccaaagatactcattacaggtgtaaatattgtccctattacatccaaaagacctgttaaattgaacacagaaattatagcaaaaccgaagatgacatttggagccattgaatttgtacttatttggaatccatttctagctcctccaataaacgcatctatcacatttccttttttaacttttacttctttttttgctacctcactcatgttaagcttcccccttgtcaaatttatttaaatataatctaagtaagttcgccccaacaaacttcataattaatattaaagcaagtggtataaatattggtacatctcctataaatggaaatagtgctgctccagaagcaaagaaattcgtaattgcagacgcacctgaaaattgaaatgcacaaaatacagctttttgtttttcatctatatacccatcatctttaagttctttagtcatagatgcagctgcatctgtagactgtaaactagctatcaaagttagtcctgcaaatccaggtaaccctaataatggctttaatagtggactaagaagcttttgagctgccttcattccatctaagtggtctataactctaactactccaagtgcaaacataactgatggtattaatgtcaatgcatatagccatccatctcgagggccagtacctccatcacctctaaagtttgaagctaatgtacctacaccatcattaattgttcccaatgttccaaaagaacctaatacattgttaaaatccaatacttttaatggtcctggtgcatctttaaatattcctgaaaaaaataatgctcccaatattaatgctacatacccataccattttacctcaactttttctgttgttgattctaatttactcatataaattctccctcctgtttaaatgaattttattagtatacttgtttaataagcaaaacttatgccaataccttaatgataaagcctttgtatttatttttttattgtaaatttattccagcgattaaatagcttataattacttacttttcaagtttaaaaatataatatttttttattaactatttaaaatatacattacaatataaaaagctattttccttatcttgcaaaaataattttaaaataggtttttataggataaaatcctaaaaaaacctattatttaatcaaatatataaatttatactactatttgttgtataatataacttaccttatactttaaatactttaaaaataaatactattttgttaggagaaataaaatggataaaaagaagttaatccttataacatatgataaattaaatagtgaccactacaaagaagaattaacaaacttttttggagacgaaataatcatagaaacacaaaatatacttgatggaataaaagaaaatttagagggagaggtagtgctttctctatcacctttaactagtaattttttaataaaacattttaaggaagatattgaaattattcatggaacgaaagcactttcaaaacttggatatgaaaaaatgatgaaactacctccaggtacaaaatcgttacttatgacaaccaataaaacttcagcatttgagatggctacttatctatataaaattggtataaatcatatagattttgtaccgacatatccagattgtgatgaaatatatgatttagatacagctataacaccaggtcagattagatttataccaaaatacataaaaaatattgttgatttaggttggagaaaaatctcattagatacatatatgtcattattagtagtattaaaactaaaaaatgagaaatttatagaaaaactatacaaattgtccaaggagacactaagtcatgatttcttaaatacgtcattagataatatatctaaattaaaaactatactttacatgaccattgatgaaataggtgatggtctaatatttttcaacacctttaacaaggttacttttgtaaataagtctttacttaatatgttggaactagatgaaaaacttataaaatcaccttccttaatggaatatatgccaaagagtttcttagataaaattacaaagaacttaaatatcgataatatgattatatacatagacgaaatagataaaaaattcatactttctaaaaaaccattttatctttataaaaatatagagggttgcttaattacattaaaagatgtaaacaatatagaaatattagaacaaaaaataagaagtgattctgtcaaaagaggttatgtagctaaatataaatttaataatattattggaaatagttctattataaaagattgtattaaaagggcaaaaaaaatggctcttacagataatcctatattaataacaggtgaaacaggaacaggtaaagaagcctttactcagtcaatacacaatcattcaaatagaaaaaataaaccttttgtagcaataaattgtgcttcattaccaagtgaattacttgaaagtgaactatttggatatgaagatggttcttttactggagcaaaaaaaggtggaaaaaaaggattattcgaattagctcatactggcactatatttttagatgagataggagatatgccacatgatttacaggttaaacttttaagagtcttacaagaaaaagaaattagaaaaattggtggtacaagtattattccaattgatgtgagaatattagctgccacaaataaagatttagaaaaattaattatagaaaataaatttaggatggatttattttataggataagtatgttcactttagatttacctcctcttagaaagagattagaagatatacctcttcttttagaatcatttttaaaagaacttccctataaaaacataaaactcgataagagtcttttagaagctttaaattcatacacttggatggggaatattagagaactgagaaattgtgttgaatatatggcttacatgggttccaattatcttacaataaatgatttacctcaaaacatatcttcaaaattaaataataatcatatgtcaagtaatatgtctatattcaatgatttaaaccaatatgacaaaaacatatgcatttctatcctaaaatcattgcacatgaaaccaatggggaggacaaagttaatgaaatttatggaatataatgtcacagaatacgaagtaagaaatatgctagaatatttgacacgcaatggatacttaatttctagtaaaggaagaaaaggctcatcaataactgagaaaggcataaaaataatagaaaataatataatttaaacctatagtaattcatctttactttatcaaaatttatatataattataattttttatttttctataaattttttataaaataataaaacttatttatattaaaaaagaagctatctcaacatagggataagcttctttttaattgttaaaaagataaaaatatatttgatttaacagaaaaatagtgcctcataaactaaaaagttcattttgagacacttccttaatattaataaattaattggcttaaaattactgattgataattataaagtacctctgttaaaggagtaaattctgaaccgattccaaatcttaattctgtaaacgcctctaaataatctgggtcacatacatcttcttgtgttaaatcttgtttcaccatttcagtagcaagataaattgctactgatggtagaaaagcatccattggcataggatatccaccaagtctatttgacataccaaaagccttagccttttcacttatcatgtcgtttattttatcataattttgagcatctttttcagatatttttagacccataacactaggatacgtttgtattggtgatggattgctttgctctgcaactatatactttaattctaaagccttagtcaatataacttcatccatatactcatttacaccaaatacatttatatcttttccatattttttaacttgtttttcaatatcttcatttaaaaactgcttaactttgtttttgtcttcttcagtatttatatttggagtattaacttgtacaaatggcaatcctatatttttacaagtctctttaatcatttctaatcttttggctatattaacatctttcaaatcatctgtagaggcataatgaataaaagcttttgctcccatttcttttgaacgttcagctaatacttttcctctttcctctgcactaacccctagattcacatcaacaaattggcttaattggtttttatcatctcccataggggcagaaatagttattatttctggacgcttttcctttaccttttgtaaagcaggtaaaagccctgcttggtcagttgaaactacaatagcctgaacttctttatcgtcagccaactttactatcttattaatagcactatctatattagaagtaaaattctctggcaatacaacatgttttatagtttgtttaactttagtttgaccatctttgtctttatcaattttattctcttcctcatattcttttgtcatctcttccaccatattgtattgtactttattttcagataatggttgagttaccactgcaactttaaaatcatctataattttctctttatctttcttgcctacaagtaaactacaacctgtaagtccaataattaaacatatggatagcataaatgctgttatttttctaagcattaattaaaacctcctaaatttgtactttcttatcactattactaattttatcatacttcaaagaaaaattatattataaaaaattatatacatgctattccaatccaatctaaaaagtactatgggtagattaggtttagattaaacctacccatagtactaaaaattaatatattataaaattaaattaattacaaattattatgctacttgtttgttgctttttataaagttaccaactattccacccaatatagctggtattacccagttaaagcccaaacctgcgagtggcaagctttgtataaatggaacagctcctgtcattccatttatagctgataatagactaatcactaatgtaacatatgctgcacctttaaaagcattatcattctttatatgtttaccagccaactccataacaactattgctaataaaacaggatatatagtttgtaggattggaactgatatagctattatagaatcaacacctaaatttgatataagcatactagctacacatatacctataaccagttgtttataactcgccttacttattccttcaaaataagttgatattgatgctgttaaacctgtagaagtagtcagacaggcaagtgccacaattacacctaaaattacctttcctacttgaccatataacaatatactagttatttcaactaataaagatgcttgaggtatactagtatcatataaagttgaaactgttgcacctaaataagtaagaccaccatatactactgctagaaatacacaggctacaaaaccagctttaatagtcattcctatttggtctttatctgatgtatatcctttagctattatagacatcaacattatagttgccatagatgctgcacctagagcgtccattgtttgataaccttgtgatataccttcaccaaatagatttttatctatcatatgctcaggactcataggtcctgctggagaaattataccctttactattaaaacaaataatactaataataacgctggagttaaatacttacctattatgtctataaccttagaagacctaatagtaaatgctaaagttaacccaaagaagattattgaaaatatagctttagctactggtccatggtctccaaatataggcataatacccatttcatatgttgttgcacaagttcttggtattacaagaagtgctaaacatgctagagcagctacactcattactcttgctaaccctttaccagctctcctaagtacatcatccatgcttcccttgcatcttgctgttgctataataacaagcattgctataccagcatctgcaacaacaaatccaataagaggaattaaccagtctttgccggattccatccctaaaaatggaggaaacataagatttcctgcaccaaagaacatagaaaataaagcaaaaccaactataaaaatatctctcatctgcttactcacactaaattaccccctttgaaaatattttgaatattaagataatcttactttattttcagaaaaatgtcaatctggtaaaaattcacacattgttaacgttttcccaatttattttatgaatatttttttcattttatgataattcccatcaatttcgttaaatcaattgcttgtgacacatcaaaaattgctcctctaatctcatctataccaatctcaattccctcaatattattagtggtaaaatctatgccagaaagtttagttccattaaagtttgctttttttaagtttgtatactcaaatactagattgtcaccttttacttcttgaaatacagaattttcaaaatttgaatctaagatagaaactatcttaaatttagagaatgaaaagttagaatacttacctaaaacatccttgaacaaaacgtttttaagtatacaatcatcaaatctaactcctatcaatttactatttttaaattcaactctgtatatacttcctccatcaaaaaatgaatttgataaattgcagttttcaaataccacatcaagtaaatcaatcttttttaaattgcaattttcaaaggatacatttctaaatatacaagattcaaagctaactcttacagaatctaaatcacttataacttcattttctataattttattaaatattttttcatcattaaatatatcttcaagtatatcttcaagattttcaataatttctaattctcctgtaaatttaggtttttgcactttaataattttagtcattttcccctccactataaattatattatttttgatattattttttttaatatattaacttaatatacatatttgatatattaaaaagtttttacgaaatatccgtgtattcagtacttttataattatatcacaaactcatttataatagacttctatataatagtataaaacaagttagaataattgacattatacttatacatattcaattattgaaaacagtaattcttgccaataaataaccttaattttttataaaatcgacaaaaaaacgaataattttattatatttattgtaaataatacaatattacgatataatacaacagaaaaacaaatagaaaatgttcatataatattagtaatacggtctaatagtttctacaaactcaccttaaatgggttttctatgaatagaatatcaactttgaatatatgttctattctatctatatgaatatatatttttttgtttatatcttaaagttttttggaggtaaaaatggtaccaaacactaacaatgtacaaccagatggaaataattcatcattaagctttttagacaaaatgtttaaatttagcgaacgtggctctagccttaaaacagaagtaataggtggagttactacattcttaacaatggcatacatagttttcgtaaatccagcaatattatctgaagctggaatggataaagccgcccttataacagttaccatactagctacagccattggtacacttatatttgcgattttaggaaatgcaccatttgctctagctcctggtatgggattaaatgcatttttcacatactctttggttataggtgcaggaatcccatggcaaacaggtcttggggtagtttttctatctggatgtgtcttctttacactcgcagtaacaggtcttcgaaagacaattgcagacgcaattcctagagaattggcagtagcatcttcagcaggtataggtcttttccttgcttttgttggtttaaaaaatatgggtgttataatagctaatccagatactatagtttcacttgcagattttacaccaacagttttaatagctctttttgctcttatcttaatggcaatactagaatataaaaaagttaaaggtggaatattgataagtatagtagttgcaacaataatatctgttatatttggatttgtggagttgccaacagcaataatctcaacacctcctagtatagcaccagttgcttttaaattagatattgtaggtgcattgaaattctcattaattggacctatattctctttcatgtttatagacatgtttgattcattagcatttcttattacttgttgtaaacaaatgggtcttgaagatgagaatggtgaaataaaagatttaggaagaatgttatatgcagatgtttcttctactttaataggctcattcttaggaactagtactgttacaacatttggagaatctgcttctggtatcgcagcaggtgcaagaacaggacttgcttcaatagtaacagcagcattattcttagctacacttatatttacaccattgcttggtatagttcctacttacgctgcagctcctgcacttgtaatggttggtgtattcatgtttgaaagcataaaacagattgattttgctgatagcaaaatagctgtacctgcttttgttacagttttattgatgcctttaacttatagtataagtattggtttatgctttggatttatttcatatataataatgcatgtggtagctaaagaaactgataaaatcagtattacactttggattataggtttacttgcagttgtaaacttagttctaagttaatattttaaatagttctaggtcaatattttaaatttataaatagcaaaatcaatttatgtataaattgattttgctattaactttgtatagaaaatttattatcataatacatagatataaaaatatatagaaaagaggttgtacttatgtcacaattacttataaaaaatgcatatctaattactatgaatgcagatagagaggtatatgaaactggaagtatacttattgaaaataatattataaaaaatgttggtaagtttgatattaatattgtagataaagatgctgagatatatgatgctaaaggaaaaatactaatgccagggttagtcaatacacacgttcacttatcccaacaattaggacgtggtcttgcagatgatgttgtacttttaacttggcttagagagagaatctggccatacgaaagtagcttcaactatgaagattcattgatttcatctactgcatgttgtgttgaattgataaaatctggggtaactacatttttagaatctggtggtcaatatgtagatgctatggttgaagctgttgataaaactggacttagagcctgtttagctaaatcagttatggatacaggagatggtcttcctgaagcatggcaaaaaactactgatgaggaaatcaacactcaattagacttattccataagtttaataacacatctaatgagaggattaaaatatggtttgcattaagaactatttttaatacaactgaagaattgcttattaggactaaagagttagctgataaatacaatacaggtatacatatgcatattgctgaaatagctgatgaaatttcatttgtaaagcaaaacaacggagttggaacagttgaatatcttgataaactaggtgtattaggaccaaatcttttagctgctcacacagtttggcttactcataaagaaattgatttatttagattacatgatgtaaaagtttctcataatccaggtgcagctatgaaagtagttctaggatttgcctcaattcctgaaatgttagaaaaaggaatacctgtttcaattggtactgatggagctccttcaaataatagaatggaccttatgagggatatgtatcttacatcactaatacataaaggtagaactttaaacccaactgtcgtaccagctgaagaagtcttagaaatggctactataaatggagcaaaatgtgctttactagaaaaagaaattggtagtcttgaagtaggaaaaaaagctgatatgattattctaaatccagatacaattcattgtttaccaatgcataatccaattggaaatatagtttattctatgactagtgaaaatgtagattctactatttgtgatggtaaatggttgatgaaggaaagaaaagtattagttgtagatgaatctgaattattaaataaagttaaaaaacaagcttctaaaataaaagataaagcagaagttaaaattccatctaaatttaaaatcataaaataacataaatttcaattgttttgtaaatatgaatatataaatatatttatacacatcatatatacaaaacaattgtttttttattttatattcattaacattgctcataaaatacaccataattccagaaaaaataaccaatcagttaggattacatcatctaagcaatatataaacgtcttagtttataagttttattctactcttatctaaaaccatctttaaagagttttcaactgtttcaattacatctttataactcaagtacacatttgcgtagatacaatcttcatataaattatattcagttactctacaatacagcagttttcctccatctaataaattgctcaaaatatagttttcttttcttgggacatagcctattacatatccagtttcaccaactattttaatagctttttcatcatatagattatctttctctctagttaaatagtatatcttactcttctccaattctttttcaagatattctctatttctaaaccttgaaccagcaacagctattgaagtcaaatagatatccttaccatgttcatctacttttattttttcaatatttacaaattctttttttaaattattactttcatataatactcttcttaattcatccttcaatataacatttttttctttttcatacgcttctttaacaatttttaattcttcaagagatagtttctctctgtatctttttaagatatttatggattcttttcttacttcatttatatttccaaatattccttttaaagatatattctttccttcaggatatagtgatttacttcctttaagcacaataaaaaataacatatcatcataatattcttgagtcaatttatctttttctatatctttcatttttccaattaaatcatctattttaaacgtctcttcaaaaaaatttaataattttaatctagaacttgtcgttccctttttagatatatgccaatatacctcaaaatctctaatatctctattcagatatggcaacaagtcatcaaaagataagtttacatcataaatttctgacatttttataatatcttctgtttttccactagcatctcttaatgcttcaaaatatatatttttccatttttcactgagcaagatatcatttatttctttttcaaattcaatcttattgtactctatattttcatcttttaagacgtttatagctattaggaaaattgaatataaactttcaaagttagtcccataatttactacagtaggtaaaaatcgattcactaattctaatttattacctatatatttaaattctacacttagcaagtaattgcatataagacgtgctaaattatttatcttttctttatctaaatctcgtttttcaagatattcattcaaatctacaattgaaataatatagttcatcaataatcgttcgtactttgtatccttataaccatcttcaattagataggaatttattttagaatctaaattttccatattaacaatagcaaatacttttattgaacctgtagcctttttagataaattaaataaatatgtattgtaaaattcaagttttttaatagtattactcagataaaatacgtattctccagatttagaaaatgtatctacaacttctcttaagttttctacatttagatatttctcacttaaaactaaccctagttttacatactcaacttttttactcttatatattaattctttagttaatttatataaccatttctcatcaataatcatttcttttaccaaagtatttatctttttcataaaaatttcgaaataacaaattaaagacttagaattactatcctccaataaataaatttcattagattcacttttatacatatttaaaatttcatctactagattatttgcaagttctacttgttctcttaacggtatactttcatatatacataggtaattcatttcaaatgattctttgtatccatcataaccattaaattcctgcaatcgcttaaaaacattctccaccaaattatcctcctttacatgatgtaatttatattgattatactacttatttcgtcaagtttacatttatacgcaaaaaaatattactagaaattgaaattctagtaatatccttattattaattatgtaaataccctatcttataactgtaaataatatccttattaattttaattacttttaataaaaatctatcctagatttagacttctctatgcatatattatactaatattagacatcataatcatacactttttctttttcatatctcatgtttacaaacaatgcaagtaaaattccaacaaatgttattgccacattaaacaatacaacatattttggtccattaactccccctgattttgtaataatacctgctatatttaaaataacatagtttgctatactagatgcaatcataactatagatgttatttttcctttattagttggaaacatttcatttgcagttgacgttgttaactgaagaacacctcctgctgctgaataacctattacaaatccccctaacatacaaatagttggagtttgaacaaaatatacaattaatagcataagtaaagctattataggatatataactaatattcttattggtttaatatattttttaataagtaaagaagttattaatactgcacatattactcccattgagtaaaaggattgaatttttgtagggtcagccatcccatacaatttacccaattcctgattacaatttaaccataatacaaatgtagatgtacatgtaaatccaatacaaacaagagctatacttgttggtgtaaatttcatcttctctgatttaactgttttgcctttgttatcaataacattattagctggtggaaatggtaacacagctatcaaaatggcatctactacaataagaatcgctgttactataaaaataactttaaatgatattgaatttgctgcaacaaatccaattataaaaggaagcaaaaattgtgctaaagctattgtaaatttagtaaacatatttgctattgttcctaaactagcaaatatctccatacaagaaggagttacacaggtatctaagaatgaatttgctgcccctccaattattgcaaatacatatgctatataaaaatttggtgaaaatacaattccaacaaagaaaattgcatgtagaaagtttcctataagaccacttacttttcttccatacttatctgaaataggtcctgcaaatggataagatataagtctccctaatcctagtgcagcaataacagctaaaacaatacttacatccaatgttccatctgatagtgttttagccccccacattgatgaaaattctggtttgtattgtcctaaaattgaaattccaataccaagtaaaaaatatgaaaaatacaacgctatggcagtaggataatattttttattgttcataatttttctcccattcttgttaatttattaacatttttgtgtacaataaactcatcctcataatggatttaaagtatagtcagttaaagcttcaaatttaactggactatgatgcaaaacccactatgacaatttgtaatttattattaaaaatattgaaatacgtatgttttttcattgtttaagatatcactcttatctatttaaagcataattcattaacttcttctacaggcatttctaatccagtatatagattaaaagcttctgctccttggtataataacattcctaatccaccaatagccttacatccattagcttcagcatcttcaatcatttttgttttcttaggattataaacgacatctgttactactaagtcttttcttaaaacactagtatcttttatatttgtttcattgtcataaggcttcataccaataagagttgcatttgtcaatatatcacttgattctatctcctcataaagtttgtttgtatcttctaaatcatatagattaacaacacattctggtacatctttttttatattctcaactgtctgctctgctcttttataaaaatcatccttagcattaaagatagatatttctcttgctccatctaaagcacattgtacttgtatagcagttgctgcaccaccagcacccataattgtaatctttttacctttaacttctatcccattttcttttaaattacgaacatagcctactccatctgttatatgaccaactaactttccattgtcatttacaattgtattacatgctccaattatacgagctgctggagaaagttcatccatatattctgtaacagcagatttacatggcatagtaacattggctccttttatattaaaagtttttattgctaaaagtgcctcttttaccttatctactgtgatatcaaaggctaaatatctataatctaaatctaatttcttaaaactataattatacatcactggtgatttagagtgaccaactggtgtacctattaatgcaaataatcctgttctacctgaaatttccataactataatttcctcccaatattatcattttctttgcaaataacctattcagttatttacaaagaaaaatttatttattatttatatatttaatgctacttcaaaagcttcttttgttgcatctaatgccctacgagcttttactgcatcaccaacaatataagtttcttttacaacttcttttataacttcacttaatgggtcgtaattacgagaacccatagcaagtactactgaatcaaaaccttttaaatcatgctctgtgccatctgtaagtaaatagtcgacaccatcatcataaaatttagaaacttttgcaccagtaatggtatgtatattataattttcaaaatcattcataaggaatttacggtgttctgaaattacatctgcaccaacttcttctctaagctcaataacagtaacctcatgttcttgttctccaaggaaggctgccacttcacatccaaccattccacctccaacaacaagtacttttttcccacaagattttttaccatcaagaaggtctacagcatgaattaatcctgaatcattgattcctggtataggaagtacaagtggagttgctccagtagctataataactacatcaggtgatttctcctttataagttctactgtagcttctgtattagtacatatttttacaccatattgattacattttgaaatataacttctaactaagttagtaatatctcctttccctggaggatatgcagctaaacgcatttgcccaccaagaacttcagatttttcaactaaagttacattatgtcctcttttagcacatacccatgctgcaagcatacctccaacacctccaccaacaacaagaacttctttgctaatttcagctggcttaagctctgcttcatgtcctaatataggatttgcaagacaggctataggttttccttggaacatatttggtacacatccttgtaagcatgcaatacatggtatcatttcgtctagttttccatttttagctttattaggcatttctgggtcagccaagctttgtctaccgaatgctactaaatcacatcttccttgtctgaccattaactcagcaaactgtggctctgtataacgtccaactgttattactggtatactaacagctttttttatttcagtaactaattctgcactgaatccagcatgtaaagtcgtaggagcccacatatattcatcatgtatatgtatactacgtgaaacatgaagtccatctattccacaaccttctagatatgctgctattactgaactatcatgtatatcaattcctcctggaacatcatcagtgctgtttatacgacataatattgctagagaatttcctacttttttacgtatattttcaatgataagacgaggtaatctcattctattttcaaaacatccaccaaactcatctacacgcttatttgttctttgtgatataaaactactaaccagatatccatgagcgcagtgaacttcaacagcatctgcaccagctttttgtgcacgtaatgcagcatctccataagattctataagttcatatatttcttctgttgttattgctagtggtgtattacgaccatttgatgcaggtattgcagaagcagcttttaatggatgtcctgctactttttcatttccttcagaaccagcatgttgtaattgtatagataccttcgaacctgcatcatgacaagcatctattacatttttaaaactatctattgtgctatcatcatataaacaaggcttacgaggacctccttttgcttttttgtctacaacactagattctatagttattaatccaaaaccacctaaagcacgctcaagataataagccttagaagtttcacttaaagtaccgtctgtgtttgcaaaattgtttcccatagggggaactacaaaacgatttggaactgtcattgaaccaattcttataggtgtaaacatagaactaatcttcataaggttttccttcctttcaagttttatatttaaaagttttatattataatactctgtatatttttatattatataagtttattttggagatacttcagaccatgctttatccaaaacttttttagttgcattaaatacagtttcagcagcagtggataaccctttagatattagagaatcagatattacttctgcccctatgactcttggtgatatattgtgttcttttattattttcacaaattcctctgtgtttccatatccttcacctggagccaaacggtcatgtagtgattcatccctaagtttttcataaggagtttctaaaacatcacacacttgaattgatactatcttatctgctggaacaggtgcaaggtcctctgctgtctgctttgctctagcccagtgccaagtatctaatataagcattgcattttcacgattacatcctttcacaacacgccatgcagtagccaaatctggtacaccactatatggcataaactcaagacctataataagttcacctgctctgtcacataattctcccaatgcagttataatttgttcttctggtatcatctctaataatccacaatttatatgtttaacattaaataagtgagccatatgataaacattttgctctttttctctttgagcttcagttctatcttcttctgttccccattgagttatatattctacttctgtaactttcatatcatattcattaagaattgcaatcatttcttcatctgtaacacctgcattttttgcatcaatataattttcagcacgcaatccaataccatcaaatccagcttcttttgcaatacgaactctatcacggaatgaaacttctgttcccaatgtataagaactaattgtaattggaatattaagatttttttgattattcatagcttaaatttgccccctttattttctttataattaatagtatctttgattttatatttttatttatcctactagtagtattattttaccttaaaaataaaagtattttttgatttctatttatctagattttataaatttattgtatcacgagactttactaataacaaattgataatttcctattaattcatagattttgtttatagattttatttataagataattcttgtatttttctattaggttgtataaatatatttatcttataattcagacaaaaaacgataaatttttttaaaagcttttattcttactctataatcatatataataaaaatgtaaaaatatcttaaaggttaacttctacaaatatataaataaaaatacctatgaaaggatgaacaaaaattgaatttatatcacttacgctattttgttacattggcacatttagaacactatacaaaagcggcagaaaatttatctataacacaaccaagcttaagtcatgctatttctttactagaaaatgaacttggggtggctctatttgaaaaagaaggtagaaatatagtccttactaagtatggaaaaatatttttaaaagatgtggaaaaatcattagaaattttagattcaagtgtaaaatcattaaaaataactggtactggtgaaggacaaatagacttagcttttcttagaacacttggtactgattttatcccagacatagtgcataaatttttaaaatctaatcctgctaaatcaatagattttaaatttcatactggtgtaactactgacattattcaaggtcttaaagaaagaaaatatgatattgcattttgttcgaaacttgaaaaagaaaagggaattgaatttatacctgttgccaaacaagatttagtactaattgtaccatatagtcatccactagctgcaaaggatactatagatttaaaagaaaccataccttatcctcaaatagtatttaatcagagaagtggtcttagatatataattgatgatatgtttaaaaaaataaatcaacagcctaatatagtctatgaagtagaggaagaccaagtaattgctggattagttgcaaaaaatttcggaattgctgtagtcccaaatatgaatatgcttagctttacaaaagtaaaagtaattcagattattcacccaagttgggaaagaaacttttacttagcatttataaaagatagatatttgcctcctgcaattaaaaactttaaaaactttgtcattaaaaacgctcaattataatttattaataaaggggttatttttaaatatcctcttttattctttttataaaataaaaaaatctatacttttaaaagtatagattcctaactgacagtcggcatccgagtctcagtaattatcgttatacaacagcaactggattcagttcctgaataactaggttatttacattatatcagatttttttaaatttgtcaattgtatctaacgcattttttcaagccatggtccaacaggctctacaataggaacttctttaaatccccaatttcttatatcattcacactcgttggagtatatattttgtttctgacagatttgaatattttgtttttttctccatattgcatacactttggattagcttctattaaccctcttcttgctctgctaagaggattacataaaatatctgctatttctaaaccttctctatagtcagcatcttcttttttggcaattataaaacccttaaccttatctcttaattcttcatctatatctaagtatattgttccattattaaatacatcaaaaaacgccttttgtacttttaagtttgagacatcatcccttgactctataactattcgtgcagattctacagtttcattatttacaaatgaataaaaattctgaagaacatgtataaaagccacaacatacggttcctttgaaggtgcataatatttctttaatctagctttatctactgttactgatattatagtacactctaatctagatagaaataaaggcaactcatcatagaataacttaatctgtgaatcatcaaacttctcaaatgctcttgattttcttgatatatctgtcaaatgtattcctatgttactggttccaaaacaatactctttaaatgcatccatttctttcctcaaagaacatacataatcgccttgacttactgcatatttatattcaaaaattactcctgtcaatgtaaatgggtcttcatgatttatatcagctcttccactttcatcaataaacattatatattttttctttataatcttactcaccctcttaacatatgatgatagcatctatattcattttatatgagttttaaaaatattccaagatttttatataacttaaacttaattttatactaaaaaattgagatgtaaaacaatcaagcttttattgattgaatttcacatctcaattataattatttttcaatatatatttttactattttgcaagaatatccattaatttatccattactatataagatactccgcctcctatttgataaggagtttcaacttttttatttgcaaatactctttgttgctctaatgataatcctgaattatccattaaaactattggtgaatgtaattttacagctaatggtccagctgataaagcatctactaaagcatctgatttactaactaatacagcctgtaaatcagtatctccatagaatttttctattactttggcattagtatctactctactatctccatatattctatttcctgaaatatcttcagtagttatatcattcatttttgctattactgaatcgttaattgcacttggtccacctataaagtatgcattttctaattttctttctgttagccatttataagattcttctgtaattccatctttattgactaatattataggttgtttttcttccccagctttagaagctacagataaagcatctgcttccccatttccagaaaccatatatgcagtttttatttcttctcgatttccaagttcttcagctattcttgtagcagtttgatatctatcttgacctgctattctctttgtctctgtgttgaaagtagtttttatttcttgctctaatttagaacttattgcattttctccacctatcaagattactgttttaggtgctaataacttcatttcttcaacagtttcagttggtaaattagctgtattagtaagtagtattgttgagtcatagctacttgctaaaggagttgctgttataccatcagctattgcattaccatttactaatattacagtatctgaactatcagcattccagtttccaactgaacttatctttttagctgtatcaaatctatttgcacctataattgtatcccatgtaggatttatagttccatcttcattaaaagtataatctttcccatctattttttgagaaccagttagcatctttccatctttgtctaaatagtaagacttaccatctatttgttgccatcctgtctgcattattcctgttttgtcaaagtaatacttattaccatctatttcttgccatcctgttactgataaaccatcagatcctagatagtatttctttccattcttttcttgccatcctgtttgcattactccatctgagttaaagtaataagtttttccgtctattactttccatccagatactcttgctccatcagttcctaaataatattttttgttattaattgctttccatcctgtttgcattactcctgaagcatcaaagtaatacatttttccatttacttttagccaactattcttttggtatgttccatcagattttacataatacttcttaccattttctgttttccatcctgtttgatttagatttatcttatattttgccgctatctttacatagctgtcattactataatctataattacatctgaacctacaggaacttggtcaaataaccatctaacatctttattgtgcattcttatacatccaccagaaatatgctttcctatagaactctcattattatttccatgtattccatatgtatctccataagttccttttaatgctaatcccatccatctatctcctaatggatttcttggacttcctccaggtatattacctttataatatggtctattttttatcttgttaactacttttgttttccctgttggtgtttctgacccctttttacctgttgcaactctaaattcttttacaagtttattatttacaaaatatcctagagtattctttcttgaatttactataatcacatgtttactggctgcgcttgattctggtacgccacatgcaaatactaaaactaaagtcagtgctagtactaaatacttttttagactttttttcactataacttccccctcttttagaaacattactacatgtgtctaattataacataaaattaccaataccttatatttacaaatttgttacatttatacatataagtatgtattctactcttcatacccattaggattcatactttgccatctccatgaatcttcacacatctcttcaagttcatacttagctttccatccaagctctttttctgcctttgaagaatctgcataacacatggctacatctccagcccttcttcctacaatcttatatggtatttcttttccacttgctttagaaaatgcttttactaaatcaagaacactataaccctttccagttcctaaattataaacaacaagtcctggattttcttctaatttttgtaatgcttttacatgaccagcagctaaatctaatacatgtatatagtctctaactccagttccatcatgtgttggataatcattaccataaacactcaattccttcaatttacctactgctatttttgttatataaggcattagattgctcggaactccatttggttcttcacctattctaccacttttatgagcaccaactggattaaagtatcttaaaagagctatatccaatgacttatctgcttttgatatatctactaacatctgctctatcataagtttagttcttccatatggattggttacagaaagtgggaaatcctctaatataggacaagtatgtgggtctccatatacagtagctgaagaactaaatacaaactttttaacaccatattctctcattaattcaaataaatttaaggtacttattagattattgctgtaatattcaattggtttttctactgattcaccaactgcttttaaagctgcaaagtgtataattgattcaatattattttctttaaatacaacatgcatttcatctttatttctgatatcaatattataaaattttactggttttttagataattccttaattctatcaaccactattgagttgctattacttaagttatcaactataacaacttcataacctgattctaaaagttctattgctgtatggcttcctatatatcctgctcctccagctactaaaactgccattgtaattacctcttttctaatattttatttttcacttactttttttctcatatagtccattaaatcatcttttaaattttctctctttagagcaaagtctattgttgcctctaaaaaaccaatcttatctcccacatcatatcttctaccttcaaagttataagcataaatagcctcttgttttccaagagtttgaagtgcatctgtcagttgtatctctccacctttaccaggtgtctgtttctctaatatactaaatattgcaggagttattatatatcttccaagtatagctatatcagatggagcttcttcaattgcaggtttttcaaccatatctttaactttatatactctatcttcgatatgttttacatccaatataccatatttattagtatcttctttagctatcttttgaacacctaatacagttgttttatactcattataagtatctattaattgttttaagcacggaacatctgaatctactatatcatcacctaataatacggcaaaaggttcatcacctataaaactttttgcacagtaaattgcatgtccaagaccttttggctctttttgtcttatataatgaatatttaccatatttgatatgtctcttaccatttctaacatctctgtcttacctttttgctctagttctaactctaattcaactgatttatcaaaatgatcttctatagattttttatttctacctgttattataagaatttcttcaattcccgattctatagcttcttctattatatactgtaaagttggtttatctactataggaagcatttctttgggctgtgattttgttgctggtaaaaatctggttcctagccctgctgctggtattattgcttttttaactgtcatctgcattttttcacccttcttcgtaaattttctattgtaccaaattaatataccatatttatactttttcttcaaactctatattatcccaatatttaatgctataagataatataaggtagatgaaatttcatctacctttagttttataagttaatattgtattgtttatattttatccaaaacttatacaggtactaaatttcatctaagatgccttttatatcactatctatatcttcatctagataagaatctaaatcttctaagtcaacttctagttcttgatatgtcatatcaacactgacatcctcatctatatccatttctgatattaattctcctaaaatactatttccatcagaatctaaaccactatctatatcttcatctatatagttttcatttaaaatttcatctaaatcaatctcgtaataaacttcattatttttttcatcccctgagtccaatcctaagaactcatagttaaaagtccaaacattgtatttacttgacatactttattcctcctgtgaaaaacatattttcatctagtttattggttccataatcaacagagttatatattttttcaattatgtcttttcttctttcttttgtactattatttaatgtcaattgtttaaatacatatgtatttgttattctctcgaataatatttcttttatactatcatcatcaatatttctatagtttttccacaataactcaaataacttaaacatttccctactagtttcatctacataataaggatacatattttctactaaatggtttaatcttgatatggcttgttttaaaaatacatcaagacttgcactttcactttcttttaacattctataattgtatttcttcttatcttctcctgaaattacaaagatgatattgtctaaacttttttcaacttcatttaaataactgcttatattatatgataagtcagacaatagatttttaatctgcttaaacacttgtacatcaagtttagtattatacttttcaaacaaatctatttcttgattttctaatattcttggcatatatgctgacaataaatctaaattgtttctttgttcttgtatttgcttataaagtgaatttataacttctattcttatttcatcatttaactctttttctaaaatcttatcaaattcagatttcatatagtaaatatttccaaaaaaattaaatattatcatatcattcatagctttagaccaattcttatatatcacttcaatagaattttctttaagtagaggttgctttgcatatataaatacatcttgcataagtttttgaaccatatttttacttaagtttaaaagtactttttgattattaaattttatttccgtttctacaaaattagaattttcgttttcaagttctttattaattacaatgtcttttatatcactattttttatagatatgatttctttttgaaaagactttagaatagtcaagctatcgaaatcttcttgaataaaaaatggagcatgttttaatgtatatcccactatttcattttctatatcttttaagtcatctatttgcataatttctctatttttatcatttatatgtaggttaaatacatttttattatcatataatattatatcttctcctaaatttaacttagaacaattatctttcgctgactttacaatagtcttcttagatttcttatttataaaaattaattggtcttgatattttactaaaagcatgtttgtgtttttataatcaaatccatctatatttcctgatatcttgcagaatactatatcacaatctttaggaagatttcctattttttggttatctttaactctctcatttaaatcagatggaactacactatctatattgttattaaatatagatacagaccttactataatcccctctctttccatatgaaagtatcccttcaatgacactcttttatcttctaaaatgtatctttctatatcatcaaaatttatttcaaatctatttttcccactgataaatataaacttctcattatctttattaattccacccatataaaacttattgtcatctaaacttaatatagtcatattatcctttagatagaatataaattctctttgacttttgcagattaaatcatattcatccaaagttattttcatagtcaaatttgctgtaacatttttacttgaattttcactttttatgtaaaaaggcaagttatttccatagacaattatttgagaatcttctaaaactgcctctaatttttctttattgtctgaaaaactatatatatattttacacctgtatcctcattaacttcatctgatttgctgattattatattccctagatttgttatatgaagctttttatattcttttgagtatctacttatgccactaagctcaaacccatcagaaagctcatatatgattttttctcctaatttcaacataccttcaccacctaaacagaattataagtattttataaaggtgaataaaatgtctcaaaacaaataatatttttttaatactttttattctgagacatagtttctccttttttataatgctctaagcaccttcaactatttcttcataaagtttatctaaatgtttaacatattcacgatatccagatttgttctttaactcacttcttaaatcttcatatttttgtttaagttcttcagcactcaaagaaggagctgattcttttaattcttctaacttataatcatagtacttatcatacatagctatatatgtatcaatagatttcttagctagttcattacatttttcttgtgcttctccatattgagaataatcacctatttttattttatagtatccattttcttgaattattgttgaagaaatacctttagcctcatattcttttgctgtttcttttgctgttttttcaactttaagtgaacctgcataaacagtgtaatatacacctttaccatctttatatgcttccatttcttttgctttcttttcagcttgtgctttttcttgagcctctttttcagcttttgccttttcttctgcttcttttttctctttttcagcttgtgcttttttctcttcctcagttaatttattgttagcttgttgttgagttgatgactttggaatattctctttatcatttttcttattgttgcctactgttataaaatatcctacaccaacaataaccactataactactgctataatagtttcttttaatctactcttcttagaaacaacctcttcatcatctaaagaatcttctttatctgatacataatttttcatttctttcttgttttctctatatttgtccttagaagaatttttagattttttattactattttctttctttttaataggtattactactgatttttcattttctaatttttcttcttttatttcttttgcttttttatcttctaagtttttactttctttttcaagcttcgattcattatttgaagatactttttcatctaagttattatttattggtttttctatttttacactacgttcttcttctatatgttgacttggttcttcttgttttatttcttttaattcattttgctctatttcttctgattttgcttgatgattttcaactggtttatctaaaattatatcaggagaaatatcatttaaattctcttcttcttgttcaacttcttcattgtcttttttaataaatccaaataatttagccttctttttactctttttattttctggttcaattatatcttctttattgctgtcgtactctttatctgtagtatctttatcttctacaacgtcacctatatcttgattattactatctacttcttctttagccccttcttcagcatcatcttctattgaaatactacttctaaagcaaatatctttatctgcattttttatcatgtaaatgtattcttcaatatcgatatctttatttcttctagttctttttgatgcaatttcatgattttctaattcactatagttatcttttattagattctgtgctttattccatgtatcttcactaatttctgttttatttttaattacatagtccacaaattccttaaaattttcaggaccaaattctccaattatagtcagtctcattgcaccttctataaggtctctatttcttctctttaaaaattctaatacaaccgttgcacaagcaaaatctttaataatttctttgccaaaaccatatccttcaacagaatgaagttcttctaatccacataacttcttatattcattgtgtattgtttgagatatactttcattatttaagctatttaacttatctataaacttcgattctatatcatttgattttgattcatgttttacttttgaatttttaatttcatttagtagcatgtcattttctgaattatctttacctaattgcaaatcctcaatttcagttgcttttatttctactttgtcttgttcgttattctcttccacattattaggtaccacatctttattgctagctaatattttgtttacacagaatataatttctctttttaattctcttttcgcatctgcttgatttttaagaaataaatctccacattctttcttttctaaacttatttttctaagagatatattaaggaggtctttatataggtttaaaaccttataatccttttctaaacgtcttcttctctctgatagttccattttatcataagctaaaaaactatttaaatcattggcttttagagagtctaatccctctttcatagccttatttacatactttctacattttgctgtagttaattctaaatctttttctaattcatctatttcaggtatgtacttatctactatccatttgccaataagtggttctgtatttcttgctaatgtcttataaaacaatatattaaattttaaaagctctgcatattttgcttcattaaattctactttttcaaatttcttttccaaaacaccatctagcttttcatttattttagactcttgttttaaaaaacttgctgtgacatttaaaacagtgtttcttattatattattttcactcaaaaccttcactccttaaatcaattattttattgtaatatttacattgtgcaaagttgctaatttgattatgatatctaaataattatttactaaatttgctacatcttatatcatatcatattatttacatcattttactttttctttttatatctatcttatattataccatttttaatatctgtactaacttatattacaatattcctcaaaattttaaaagtagattagacaaatttacaaataaaaaaacatcagtttaaactgatgtttttgactatcgaaataattaagcaagtctataagcggagttctgtattagataatcatctttctaggcctattgtcaccaataggctcaagcgacctacctaccggagagtacgagcagcactctttattcctatcttggtcttgctccaggtggggtttacatagccaactagtcgcctagctgctggtgagctcttacctcgcctttccatccttaccacaatagtggcggtttatttctgttgcactatccttaggatcgctcccactaggcgttacctagcaccctgctctatggagctccgactttcctcatgtaagattacatgcgattatctggcttacttaatatttattttacttagttatgttaacacaaattcttttacatgtcaaagtaatattatactaaaaatttaaatttattcaaaaatagtgtaatatagatatataaactccatttaactcgaggtgatatattgaaaaaattatatagaatagtaattaacattatactagtattagtaatactttacagtggatttaatatatactcaaaacttaccaaatacaatcatgatactaaaacatcctcagaacttcaaaaaaaagaatataaaaaagaggatttatcaaagattaacagtgattttaaattttggctttctgttgagaatacaaatataaattatccagttgtacaatctaaagataattcttactatcttgacaaagatttttataaaaaagattctatttctggtacactgtttatggattatagaaataaatctattgatgacaaaaatatcataatatatggacataatatgaaaaataaaactatgttcaacaacctaaataagtttaaagatgctgacttctttaaaaacaataataaaataaaaataaccttgaatggaaaagaatttttatatgatgttttttctgcttatattgtagaatctgattatgattatctaaaaacaaattttaacaatgaatctgattatcaaaattacataaatgatattacttctaaatcattgtataaatctcctattaaggtaaatagcaatgataaaatagttacactttctacatgtacctatgaatttgatgatgccagaatggtgattcatggtagattgatttaaaactcacagacacagtttaaaacaataattttaaactgtgtcatcttttatacctataatttataaattaggccactaaaagtatgtaatacaaaataacaaatacatcaaacaataaaaaacaataaaaaaagactatgctaaaaacatagtctttactggagctggtgataggaatcgaacctacaacctgctgattacaagtcagctgctctaccgttgagccacaccagcacacctattctattgtaaattagtaaaactaatttttaaaagttaacactctaaaaactacacatatatcttaatgaatgaacatcaaataaatattggtcaagtcctcgacctattagtatcgataagctaaatacattgctgcacttacaccttcgacctatcaaccagatagtctttctggggtcttacccttgcggtgggaaatcttatcttgaagttggcttcgcgcttagatgctttcagcgcttatccattccgtacatagctacccagccatgcccttggcagaacaactggtacaccagaggtacgtccatcccggtcctctcgtactaaggacaggtcttctcaaatttcctacgcctgcgacggatagggaccgaactgtctcacgacgttctgaacccagctcgcgtaccactttaatgggcgaacagcccaacccttgggacctactacagccccaggatgtgatgagccgacatcgaggtgccaaacctccccgtcgatgtggactcttgggggagataagcctgttatccccagggtagcttttatccgttgagcgatggcccttccacgcagaaccaccggatcactaagtccgattttcatccttgctcgacctgtatgtcttgcaatcaagctctcttttgcctttacactctacgtacgatttccgaccgtactgagagaacctttgagcgcctccgttaccttttgggaggcgaccgccccagtcaaactgcccacctgacagtgtcccaagaccagattcatggcctatggttagagtcccagtactacaagggtggtatcccaaggatggctccgccaaaactggcgtcctggtttcaaagcctcccacctatcctgtacatgtagtaccaagacccaatgtcaagctacagtaaagctccatggggtctttccgtcctgtcgcaggtatccggcatcttcaccggaattacaatttcaccgagtctgttgttgagacagtgcccaaatcgttacgcctttcgtgcgggtcggaacttacccgacaaggaatttcgctaccttaggaccgttatagttacggccgccgtttactggggcttaagttcactgcttcgattgctctaacagatccccttaaccttccagcaccgggcaggcgtcagctcctatacatcgtcttgcgacttagcagaaacctatgtttttggtaaacagtcgcttgggcctattctctgcggccacctgatggtggcaccccttatccctaagttacggggtcattttgccgagttccttaacaacagttctctcgctggccttaggatactctcctcacccacctgtgtcggtttgcggtacgggtacctttaacctcgatagagacttttcttgacagtgtgaaatcagctacttcgctactaaatttcgctccccatcacatcccagcattatcaaagcggatttgcctactttgactgcctcaatgcttgggcacacataaccaacagtgtgcttagcttatcctactgtgtcatcccttctctcaaacggttatcggtagtacaggaatatcaacctgttgtccatcacctacgcctttcggcctcagcttaggtcccgactaacccagggcggacgaaccttcccctggaaaccttgggtttacggcctgtgggattctcacccacatctcgctactcatgccaacattctcactcccatactgtccacatgtccttacggtcatgcttcaacccgtatgggaagctcccctacccatcattactgatgccgtagcttcggtagtaagttttagccccggaaatcttcggcgcaggatcactcgaccagtgagctattacgcactctttgaatgagtggctgcttctaagccaacatcctggttgtctgtgcaatcccacatcctttaccacttaacttacatttagggaccttagctgacgatctgggctgttgccctttcgactatgaatcttatcacccacagtctgactcccaagtataagatgacggcattcggagtttgatagtcttcggtaggtgcaataccccctaggacattcagtgctctacctccgtatctctcaccttgaggctagccctaaagctatttcggggagaaccagctatctccgggctcgattggaatttcaccgctacccacaagtcatccccgagcttttcaacgctcgtgggttcggacctccacgaaattttactttcgcttcatcctgctcatgggtaggtcgcccggtttcgggtctacgtcaagtaactgaacgctcagttaaaactcgctttcgctacggctccgcaccttaagtgcttaaccttgctacttaacgtaactcgttggcccgttctacaaaaagtacgcggtcacacaagaaatgtgcttccacagcttgtaagtgcagggtttcaggttctatttcactcccctcccggggttcttttcacctttccctcacggtactatacgctatcggtcactaggtagtatttagccttggagggtggtccctcctgcttcccacagggtttcacgtgtcccgtggtactctggatcatatctgaagtcttctcgtttaacatacaggactattaccttctgtggtgggtctttccaaacctcttcaattacgatacctcttcgttatgatatgtccgcaaccccaataaagaaaactttattggtttgggctaatccgcgttcgctcgccgctacttacggaatcgaatttctttctcttccttcaggtacttagatgtttcagttccctgagttcccctcattaagctatgtattcacttaatgatacttagacattactctaagtgagtttcctcattcggaaatcttcggatcaaagtttacgtgcaactccccgaagcttatcgcagcttatcacgtccttcatcggctcctagtgccaaggcatccgccctgcacccttaataacttgaccagttaaaaaggtttgatagattagaagctatcaacttcgataattttaaaaagttatcagctttatatattacaaattagatgtcatatcactaaatatatatgcagttttcaaagtgctaaaagtgctaattttgagtattcgtaaaaacgaaccctcaaaattaaacagtaggtaattctccttagaaaggaggtgatccagccgcaccttccgatacggctaccttgttacgacttcaccccagttattgattccaccttcgacgacttcttccaaaaggttagataatcggcttcgggcgtctccaactcccgtggtgtgacgggcggtgtgtacaagacccgggaacgcattcaccgcagcattctgatctgcgattactagtaactccagcttcatgtaggcgagtttcagcctacaatccgaactgagagtagctttaagggattagctccaccttacggcttggcaaccctctgtactacccattgtagcacgtgtgtagccctaagcataaggggcatgatgatttgacgtcatccccaccttcctccaggttatccctggcagtctctctagagtgcccaacttaatgatggcaactaaagacaagggttgcgctcgttgcgggacttaacccaacatctcacgacacgagctgacgacaaccatgcaccacctgtcaccaatgtccccgaagggaactctccgattaaggagatgtcattgggatgtcaagcttaggtaaggttcttcgcgttgcttcgaattaaaccacatgctccgctacttgtgcgggtccccgtcaattcctttgagtttcactcttgcgagcgtacttcccaggcggagtacttaatgcgttagctgcggcaccgaagggggtaacccccgacacctagtactcatcgtttacagcgtggactaccagggtatctaatcctgtttgctccccacgctttcgtgcctcagcgtcagttacagtccagagagccgccttcgcaactggtgttcctcctaatatctacgcatttcaccgctacactaggaattccactctcctctcctgcactcaagtctcccagtttcaagagcttactacggttgagccgtagcctttcactcctgacttgaaagaccgcctacgcaccctttacgcccagtaaatccggataacgctagccccctacgtattaccgcggctgctggcacgtagttagccggggcttcctcctcaagtaccgtcattatcttccttgaggacagagttttacgacccgaaggccttcatcactcacgcggcgttgctgcatcaggctttcgcccattgtgcaatattccccactgctgcctcccgtaggagtttggaccgtgtctcagttccaatgtggccgatcaccctctcaggtcggctactgatcgtcgccttggtaagccgttaccttaccaactagctaatcagacgcgggtccatcctgtactggctcacctttgatattcaagagatgcctctcaaatatattatcccgtattagcatacctttcggtatgttatccgtgtgtacagggtaggttacccacgcgttactcacccgtccgccgctctttaccgaagtaaatcgctcaacttgcatgtgttaggcacgccgccagcgttcatcctgagccaggatcaaactctcaaataaaagtttatcaggctcagatactattgttatcaaaatatctggctttatggtttgtttcttgttttataaattaacctactgtttaattttcaaagttcatttcattcaattaacttctttgtgcttgttattttgttacttcttgttgagcacatttattataataacatcttctcataatatggtcaactatttttttcatttttttttaaatttattgattattcaccctttgtcatactattgtgactttatttttaaagatataactattattaatagtaatttccaattataataatactatatgcaattattattaatttagaaaggagcttcaaaatgtttagaaaagtattgcattatttaacactactttctatttctattttttttattgttggatgttcaaattcacaaaacaatcaaaacgaaaatcaaaataaggaaacacagttacaagaagataaggaaaaaatagatggtggtaaggatacttccaatgtaatagtttcagacggaacagataaaccatcaaaagccactactaataatgataataataaattagatgtatcttctttagataacactactcttgattggttttatatacctaacaataagcataaaacaccagaagtaaatacggacattgaatttaaattttctgactatgatgccctatacaatggacctacaaaagatggtcaaaaaacactatatcttacatttgatgaaggttatgaaaatggatacactacaaagatactcgacactctaaaacaaaaccaggttaaagcagttttttttgttacagctccatatataaaagaaaataaagatttagtaaaaagaatggtttctgagggacatatagttggaaatcatagtaaaacccatccatctatgccaacaaaaacaagcaatctaaaaaactttaatgacgaattatatgatgttgaaaagttatataaagatgtaactgggaaagatatggttaaattttttagacctcctatgggaaaatactcagaaaaaagcttggcaatgactaaaaatttaggatacaagactgtattttggagttttgcatacagagactgggatactgataaacaaccatcacatgaagaagcaacgcaaaaaataatggataatctacatgatggttctatcttgttactacatgcagtttccaaaactagtacagaaattttaaatgattttatatcaaatgcaagaaaactaggatatgaatttgaactcttggagtattaatatttagaattacatctaaagtctacaaactaatatagttaatataatatagattataaaataataaattaaaattaaaatttttgtttggtgatagtataggtaaaaaacttgcgatagcttatatatgttggtgggacagggtaataaaacatcaaaaaatttggcaagatattaaacatagataacagtattttagatgttatatttagatgttatgtatagtataatgaaaaatattattttattaaagaatactaataaaaatatcaataaaaatagatgtatggcttaaaattagtaaaacaattataataaattatagctacacatctatttttaatttgtacaattaaagatttattcgatttattaaataataaacattgctactatggttgttacaaccaatccggttataactgggacaaagtttcgctttgccaactctattggactaaccccacaaattgccgctgctgaaataagaccccaaggaactagacagcctccacctacccatataccactgatttgtcctaatgcagctaatgcaccaacacttgcatttatagcagttccaaatacagaggcaagtgaaccaactaatgaaatcccagaaaatccagaaccatcaagcccagttattgcccccactacagtttctatacctgatacggcaaatttattaagtggtattgtttgagaaagagctatgcctatatctgataataaaccttgtgaacctggtgctaatacttttccaaatacacctgtcaagggcgcaacttcacccatatagaaaaatgctgctattggtataattgctccaaatatttttatcccaaacacaaaaccatcaattatattctcacatacattttcaagactatctttgccaaaatttataacatttataattattattaaaaatactgctgttccacccaaaagagctgatgcatctcctccttttaggtcaaatatatacataacaattatatcagcaagaaatcccagagctactaaaatagttgctattttagattttccattgaactcttctacttcttcactttcaaaaccttttagttcttctctaaacattcctttgttaatatctctttttaatgtataaaatgccatagatatggttacgattcccatcacccaaaacaaaatcataccatcatttataacatatgatactgcaacacctgctgcaccagctgttatacttggagctccttgaataacaaagtctgtagacaaggcaagaccatgaccaaataaatttaatgctactgcaacaccaattgctggtagcccagctctcatagcaacaggtaaaaatacagctccaactaaggcaacagctggagttggccagaaaaaccaagaaagaactaacataacaaatccagttacaaaaaatgctgtattagaattttttataactctcgaaaatggtctcaccatatactgtatagcattattggcttctagggctttagataatgcaaccataatagctataatcaagataattggacccaactcatttaaagatataataaaagagttaaacactgctgttatagcaccaaagatgtttttttcaaagaacaatcccataaaaaaaacacctaatatacatggtactattgtatcctttttcataatcatagtaattaatataattaccataaatagaatgtaaatataatgtgctcctgtcaaaaccatattattatgtcccctttttttaagataataatattatatggtcttgtaagtaaacttgttacttgcctagaggtacacaatattgaacatcccataactaaagtcacatgcttcctgcttcatagaattttacataagcaattacacaatatataatagcaattacacaatatataatttaaatttttatgattcttttgctggaatagatatttcaatagcaaattctttatcatctgaatttacatttatgcttccattatgatatgcaactattttctcacaattctttataccaattccaaaactttctacattcttagaaaaattacttactctatttttttgtataattagtaatttagaatcctctactttaattaaaaatactataggcttatctttcctagcatattttattatattagaacataaattatcaaatatccttctaaattgtgtaacatctacataaatatgatattggttataaagttcattttctattgttatatgaaatcctttctcctccaatgtatatgaactatctaaaagtaattgaaaaataaattcattagcatttattttttcatacccttttgaaacttcctctccagaattaacaaaatgcgtaaaaaggtcatctgttaaatcttttatttgatatgctttagaccttacattttttatgtattgttccaattgctcaggactattgtatttatggtctttgatcaaatctaaataacaaattactgatgttaatggagttctaacatcatgtgatatcgaagttactatatctttatttttattcttcatctccctttcttttataagttgattctccaatgtatgactcatctcattaatactagatgcaagtgatgataattcatcattaccttttactgggattctatactttaaactgccactctctactatctttatacccatttctattttccttaggtactttatctttctactaaacaacagtaaaaatgttataataaatgtaagtgccataaatgtaatagaaattgcttctataaaattttgaaatctaaatctaaataaagctactacaactatattagctttaatatcagaaaattgtatctcatagtttctagccatgggactgctataaaactcattttcctcactcttatcaggtacttcattaggatagtataatgtatcataaaaaaccttatttcctttatatatcttcatagaaacaaaccaattatcactattccattttgctatatcatctccatcatctgctcttataccattgttattcacataagtttgaaaattatccataagttgatttacttctcttttaaaatatactttcccttctgatacatcttttactatagattcaacagcagagtaaaatggtatatttaaaatgaaagccactgcagctgagattactacatatatcaatagtataactcccaacttagatggcttaattttgttaatcaatataatacccctttccccatgcggtttttatatattgtggatttttttggtctttttctaacttttttcttaaatttctaatatgaaccattattgtattatttgccgtataaaaatactgctcatcccaaatagtttcatataaattttcagacgaaaaaactttttttctatttttcaacataagaattaatatactatattctatagttgtcaaaaacacaggttctccatttagtgtaacatcttgagtatctaaattgacacataactcttttgtttttaatatatttggctctctttccttttcctttccctggtatatataataacgtctaagtagcgacttaacccttgaaattagttcagaatatgaaaaaggctttgataaatagtcatctcctcctgctgaaaatccaataactttatcagagtcttgagtttttgcagttaaaaataatattggtgctgtcgttttttctctaatttcattacatgcaacaaatcctgtttttacaggcattacaacatccaaaataatcaaatcaatcgtactatctactaagtttacagcttcttctccattcgttgccataataacttcataaccttcaccagttaaaagtatttctacgatttccctaatctcaggattatcatcagctactaaaattttttttggaatctctttattcatcaccaagctcctttttttgctatatttcttaaatatttcaaactatataaaatattatactttattagcaaaagcttagcaatgtcacacgttttaatagtttatactcctgtaaacatgtttaaaacttaattaaaatgtacacacaaattgacatattaataaaaataatctatataatattatcttacataagcaacttttttcactgcttttactttttcagaagattttacatgtactactatacatatcaatccacttatagctacaaatgcataaaaacttattcccctactaagtaacattgccggaactaataagtgaccagggaaaaatatcttaaataatgtcataaaactattttcagaagctccaacagcccctggcaatggtaatgaagaaacagcaatattaagcaaggattgtatcgctaatatctcaaatacagtatatgttgatagatgaaaagctttgtatacaaagaaaggaactaaaaacatagctgttatttgtacaatagttatgactaaaatttggactacaagttttggattctgctttatatattgagcacctttaacatactcttcaatttgagatattataacttttcttgaactttcaacatcttttattattcttaacttacctaataaatttgttattgatattataaaattgtttacaagtttttttgaaaatataattgcaattactccaatgacaagagcaacatttgttattacaccatatattagtaaaatgttcataccacttacattatttaatataaactcacgttccataatgaacattattccactatatgccagtataactacttggtgaataacaacaatgactaatagtataagtgaagaatatgatatatttatatcgtcttttttcatataataaacttgtgctggttgaccacctgatgctgaaggcgtaatagaactaaaataaaatccaataaaagcatatcccatacattttaaaagagtagttttttggtttaaagctttcatacctaagtatatatttataccttcacaggcaacatatataaacatcattgcaaatccaattagtataaacatagggcttgcaccttttaatgattttatcaatgattcaactgactgccctctaaaaacaaaatatcctgttatgcccattagtaaaactaaaaaagctacactacctaggcatttatttttcttttcagttttacttatcataactacatcctttctggtgttacgaactttaaaccactggctttaagttttggaatagctatctttaaagcttcaatagtacgctcaggtgcacctactgcaccacctgaattttcacctgcatcatgtaaacaaattatagaattttcttttgttctactcattaacttgtttataataatgtctactgtactatctttctcccaatcttctgccattacatcccacaaagtcatttttagattatattttttaacaaatgaatttgaaaatatattagtatgaccccatggtggacgatagtagtttacatctacacctaaatttttcattatatttgtactttcaataaaatcttttttaacataactataactataaagccatgcatttctgtgttccaatgaatgtaaaccaactatatgattttctctcaacattctttttataatttcaggctctttttcagcattctttgctactacaaaaaacatagcttgtatatcattttcttttaacacatctagtaatttttctgtatatctcttatctggaccatcatcaaatgtaagtgcaatttcattttctccagccatattttttaatacctctttatttaatagtttattatagtatgtaggtataattgaatggactaaaaaaatcaatgcaacaacgataattaaacctactacatacattctctacacgctccttgttcatcaagtgaaaataaaatattctctaaggtattattgtcaaattgtttttttaattctttcatgttactgctcatttctttaagagtagcatcatcataaattaaatcttttatctcatctacatagtattttttatttttaccaagtattctcccaatttcattatttaatataaaactagcattatctatctcttgttgtaaaaatggattaaatgccaatattggaagttctgaataaattgtttcaaatagtgttattccacctggtttagaaataataaggtcagaatctttcatatatttatatacttcattggtgtaacctactacctctatattttcatatctaccatatagtttatagtacatttttttattattaccagttattacagtagtttttactccttctaaactatttaattctttgtaaaattgttctgatttaggcagtaatcctaatcctccacccattataagaatattttttttagttgaatgatttacatgttctattcttttaaattctttttttactggaataccattaactttaatcttagattcatctattcctttaaaaacaagttcttccttagtagatttactagctactaaataacagtctgtatttttactaatccattctgagtgactacttatatcagttatgcatgttattaaaggaagatttgagttatatttttccttatatcttgatactaattgagaacaaaatggaaaagttgaaataactactgttggttgtacttcatgaagtaatgtatctaatttatttaaaaaataatctgaaaaagtaaattttatatctttctttccattttcagcacatttataaaacaaattataaagactacttccccgatttacaagaatagaaaaagtcttgtacattttatctgaatagttaggcataatgtattcaaatatatctttaattgttatttctgaattatcaaattttgcttttatatcttcacttaaagaatttgatgctgagtaatgacccataccaaattttcctgtaagaattaataccttcataagattccctcctcgttaaagcttttcttttcatatgattactatacttataagtatagactttaaatctttagaaaaacctagtataattcttaagaaatcttaaagttttaattaaaaaatacaaagagaccatctaaaaatagagataaccatattttttattatttaaataacacaaatatgttcgattccatacaaaaaagtgcctcataaactaaaaagttcattttgagacaccttttttatatctaaatatattcaaatacatacacaatcattgtaattatttaaatgtattttatttagttgttctttataattaatccataatattatattcttcatataaaggatatttttcagttaaaccaacaaccaatgttctagccttagattcttcatcataagttaaacataggtctatagcctcagcgattattgccatatcttcttctttcatacctctagtagttacagctggagtaccaagtcttattccacttgtaacaagagcaccatttggatcaaatggaattgtatttttattagctgttatataagcatcatccaatctcttttctgctgctttaccagttatatttttattaatcaaatctaatagtattaaatgattatctgtacctccagaaatcaatttaaaatctcttttaataagttcttcagctaaggcttttgcatttttagcaacttgtacctgatattctttaaactcatcacttaaagcttctttaaagcaaactgccttagaagcaattatatgttcaagaggtccaccttgaataccagggaatattgctttgtctatgtctttagcatatttttctttacaaagaataacacccccacgaggtcctcttaaagttttgtgagttgttgttgtaacaaaatcagccacttcacatggattttggtgaataccagcagccacaagacctgctatatgagccatatctaccataagcaatgctccaacctcatcagctatctctctaaactttttaaaatctatttctctaggatatgcacttgctcctgcaactatcattttaggttttacttcatgtgctatctttctaacttcatcaaaatctataagtccactgtctttatctataccatattcataaaatttataatattgaccagaaatattaactggagcaccatgagttaaatgtccaccttgagataaattcattcccataacaacatcacctggttttaacatagcaaaatatacaccaatatttgcatttgctccagagtgaggttgaacattagcatgttctgctccaaatatttttttgattctatctattgcaagagtttcaacttcatctatgtattcacatccaccataatatcttttgcctgagtaaccttctgcatacttatttgtaagatgacttcccatagtttccattactggaactgatactatgttttcagatgctattaattcaatatttctttgttgtctttttaactctcttttcatactttcataaatctcaggatccgcttttttcaagttctcaaacatattactcctcctagttattatttaaattttatttttacagacatttcataattttcgtttttatcaatatgataatttattattatagtcctttaccaattaatagtcaagtgttttgccatttttccatatttaacatagttactttctttatttttaagttaaaatataataaataatattgtctaattcttttaattggatataatttaaatgtgactattttgaaacaaaaaaaagataatatatttatatagatattaaggaatattacttaaaaatttgatataatttcaatattacgttttttaatttggaggtgtatttatgaatcaaaatgaggaacttgaatataagaaaaatattctaaaactagctctatttgtaggggaactgatgataaaaaatggagctgaaacatctagggttgaagacagtgtccttagaatatgcaggtcaagagggttttatcatgtaaatatttttacaactcctacagtaataattatttcagatgagaaatttgatggcttttcgtttatgaaaacgattcaatcaagaggtataaacttaaacaagatttctttattaaacagtttttctcgagaatttgttagtgacaaagagtatgatattgataatgccattgcacgtctttatgaaatccaagatgtaaaaccttatcctttatggttattttactcttgtacaggaattgcatctgcttgttttgcttgtttgcttggagggaattatgtattaaattttatacttacgtttataatagcaatctttgctgcaattacttatgataaaacgatgaagataagtgcaatatctgcattttcctgtttagtatcttcttttttaattgcactttcaggagttctactagttgaaataggcattttagatgaccctaaaatgcttatagtcggcgctataatgccactactcccaggagttgcttttataaaagctattagagatttaatatcagggaatttaatatcaggaatttctcgtgcttttgatgctgctatgattattattgcaattgcttctggagttggttttgtccttgatacatggtatagaataggaggtcctttctaatgactgatatgtctatgattttgcattttttattttcaggtgttgcaactgctggatttgctgttttctttaatgctccactatatctacttcttccagctggagtaactggcggaattggttggattgtatatgtttatttatttaattttactacaaatgcagtttttgcaggttttattgctgctgctttggtctcagcgtgtagtgagactttagcaagaaaactaaagcaaccagctattgtgttcgtaattccaggtattcttcctctaataccaggaattgggctatataatacaatgttgtctttgattcagaaaaattattctttggctatgtcaaaaggtacagatgcgctatttctaagtgctgcaatagcacttggtgtattagttgtaacttcttttgtaagaacattgaatcttttgaaaatcagaaaaaactttattccttacagaaaatcaaaataaaaatataaaaatagcaatgtacttaaactctacaaatacgtattgagtatttatttaaaaagcacattgctattttttaattataattatcttaaaggtcaattaatattcttgttattactggtataaattctctactgtctctaaattttttgtcattcttctttaagtataaataacagattattgtaagacaaattccaactaatccacttatggcttcaactccagttgtcattccaattgcccccaatatataataagtccctattgttcctacaagaagtgctataagaggtattatataagccattacagctgcttttaatacattcatattatccatactcacttctacatggtcaccaacttttgcaccaattgtgttgtctacttctactaatatttcttttgactctgctgaatttgtagtagcacattttccacaagcagcacaagctgaatgtctttgcatttttaactttgcagttctatcatcaacaatttccataataaatccttgttgattcataactaaccgcctccttattttgtaaatttatttatagtatccataagctcttttatcatctcttcagttttatcagcatcatcatgtttaatgctttctgctacacatccttttatatgattctctaagataattgtgcctactctatttatagcagaccttatagcagatatttgaaccaatatatcaacacaataacgttcttgttccaccatcttttgtatccccttaacttgaccttctattctttttaatctttttatgagagcttccctctcattgtttggtgctaattttctttcttccataaactcacctcatactctaatgatgtcttatacaattatgctctacttaccaacttgtttaaaatataatacggttattattactataaatgccaaaattgatattgcaatagacctactttgattcttagtttgttccatacttaactttccattcatcttaaatcctgccaatgggaataaaaatataaccagtgcatcaattccaagtacaacttgggctgcaatagtccatttactcaaaaagcagaatattccgcccacacctaaaagaacctctaatatatttataaacttatatgtaggtttttttgctatatattcttcaattttttccttacattctgcacgacatggatatatattcatattgtcatcatattttatagctaatttattatttggtgactttatatccctattacagtaaagacattttttcattttatattctcctctagtcttccttaaaaaattttgcctaaattattatacgctctaatactattataccaaatagatacaaaaaacaaaaataaaaggaataattttagctacttcttttacttcaatgtgtagtctataataaatttataataataattaaataatattatttaatctaatttaattattatgtaatctaaaataagtcaaatttgtatgagaggttaaaatgaaacaaatggaattagctattgtaagtttaaaaaaagacgctggagaaatttatgaaaatcaaataaggcaattcttaggtgataatctaaagataaatttatactcatttgaagagggaaatttaaagttttttaaagaaaaacttatactcctatctgcttatttaaaatacgatgaaatagtaaaattatctcactatgatgctcaaatcattgttcccaagttgacatttgaaaagaacagtattgatatgatatccaaattagaaaaagataaaattatttatgtatataacttaagtaaagatatggcaatagaaacaatttctttaatacatagattaggaatagacaatataaatatcctgccctgctatccagagattgagtttactcccacagatgctgtaatcctaactcctggcgaaaaaatcctgcctaagtttaaaaattgtgaagttgtagatttaaaatacagaataatagatttaagttgtattgttgaaattgctacaaaaaccaaattaaaacatctaataaaagatgacctaataaaaaaatacgtagaaaaaataattcctacaagttatagtacaggtgagttattgttagatgcaaataagtttgaaagacaatttgatttgttactatctataattgatgatggaattatatgcacaaataatgatggaataattcaattctataatcatatagctagaaaaattttgtctataaatgcaaatgaaatgattgactcatttgttggtgattgtataaaagacatcaattttcaaaacatattgaccaataaaactccattttttgagaaattgattaaaataaatcatattgatataaatttagagattaaacatatacaattaaatgtatttgatggatttatactaaagatgacaaagttttctcaattagaaaaaaagcaagctaaattaagagcacaactagtaaactctggtaatatcagtaaatacacatttgatgatatattaggttctagtatacaaactattaatacaaaaaaaattgctaataaaatggctcaatcaaattcatctatccttataattggtgaaagtggtactggtaaagaattatttgctcaatccattcatagtgcttctaggagaaaagatggtccctttgtcgcagtaaattgtagtacttttcaagaaaatctactgcaaagtgaattatttggctatgatgaaggggcttttactggtgctaaaaaaggtgggaaaattggtttatttgaattagccaacaatggaactatatttttagacgaaattggagaaatggatttaaattctcaatctaaattacttagagtcatacaagaaaaacaagtacgacgtattggttctaataatgtcattgatattgatgtaagaataattgcagctactaatagaaatttaaaagaacttgtatctaaaaatatgtttagaagagatttatattttaggttgaatgttcttccccttaaaatacatccacttagggaaagagctgctgatatatttgaaatttttggttcattaaaatatgatattccatgtaattttattctaagtgaggaagtaaaagaaatctttaaaatgtatagatgggaaggaaatgtaagagaattaagaaacttaggagaatacttctgttacttgggaaaagatattatagaaatatgtgatttacctgaatatatattggacactatagattcaaattatagtagaaccgtttgtaataaagtaagtgataatataaaaaagtatcaattcaacattggcaaagacaaaaacatcatgaaatacgactataattttaaaaggtcactagatgaatacatatttatattggataatttaaaaaaggcttatgatttaaaagaaagaataggtagaaaaagcttatgtaaaatagctttagaggaaaatagatttttgacagaacaacagattagaaatatgcttttagaactacaagactttgggcttgtagacatacttgttggtcgtggaggttcaattataacatcaaaaggagtagaatttctaaaaaatataaataggtctaacaagttaaacagttaaacctatttaacctatttaattacattttcatatatttaaaaatttattagaaataaccttttccacaaagttttaagtataattaatatttttatcttatctatgctctgaaattacttaatattaaatattaacttgtgaataaatattttttattatcaatattggcacgttgtttgcttaatattattaacataaaattaaaattactggaggtatttacaatgaattataattttaatgagattgttgatagaagcaataatttttcatctaaatggtcagaaatggaaaaaaagtatggaactaatgatttacttcctatgtgggtggctgacatggattttaaggctgcaccttgtataattgattccttaaaaaatagactagaacaagagatttatggctacacaacaagaccagattcttacaatgaatctatagtaaactggctagataggagacataactggaaaataaaaagtgagtggttaatttatagtccaggtgttatcccagctataagtcttttaataaatgaactcacaaaagcaaatgataaaataatgatacaagaaccagtttacagcccttttaatagtgttgtaaaaaataacaatagagaactaattataagcccattacagaaactagaaaatggaaactatataatggattatgaagacattgaaaacaagattaaagatgtaaaattattcatactttgtaatcctcataatccagttggtagagtatggacaaaagatgaattaaaaaaactaggagatatttgtcttaagcataatgtaaaaatcatatctgatgaaatacatagtgacattatattaaaaaaacataagcatattcctatggcatctatttctaaagaatttgaaaaaaatacaattacttgtatggctccaactaaaacttttaatatagctggtcttcaatcatcatatgtaatactacctgatgaaaaagactataaattgttagatgatgcttttaccagaattgatataaagagaaataattgctttagcttagttgcaactgaagcttcatataataatggtgaatcttggctagaatcatttttagaatatttagaatctaatatagattttgctataaaatatataaatgaaaatatgccaaaacttaaagttagaaaaccagaaggtacttatttattatgggtagactttagtgcacttggattaagtgatgaggaactagaaagtgtacttgtacaaaaaggtaaagttgctctaaatcaaggaaacagctttggcattggaggaagtgggtatcaaagaataaacttagcttgtccaagaagtatgcttgaagaagctcttataagaataaaaaatgcaattaaataaaaatatttaaggagaatttgcactatgaaaatgaatacagaaagaaaaataccttcatttagatattccttgttagtaatgcttgcaataatagctctaacatcagttggtatagttgtatttaatgcttctataactacaatgtttttactttcatggcttatagtagttcctgcagccacgaaacttggttatactaatgatgaaatagaagcttttggatttgaagttggtaaagatgcctttcaatcaaacttaattatactttctgttggtgtactaatagcagcttggatagctgctggtacaataccaacagtagtatatagtggactaacaataataacccctaaatattttctgcttacaacattaatcgtatgttcattaacttctgttgctactggtacatcttgggggactcttggaacttctggtatagcaatgatgagtattggtactagtatgggtattcctcttggtttaacagctggtgcagtcatttctggtgctttctttggagataagatgtcacctctatcagattctacaaacttagctgcagcagtttgtaagacagatgtaattacacatatgaagcatatgttttataccacaggacctgcatacgtaatatgtatagttctgtatacagtaattggatttaagtattcaaataatactatagactatgttcaaataaatcaaatcaaggatgtattaaattcaaactttcatattggtttagtagcaatgattccaataatatttttattattacttttattgctacaaaagccacccattatatctatactaagttcagctatcatgggacttattatagcagtatttcaagaaggagaaaaaataggtgatattttaaattacatgctatcaggatttactatagatactggatttgtctatgccgacaaactattaaatcgtggtggaataatgagtatggctgaaaccgttttactagtatttgtagttttcgttattgccggtattctccaaaaaactggattcttagaagtactgcttcaacctcttataactaaaataggaaaatcaagaactaaattggttgggtctacttttatagtaagctactttgcaaatgcatttagttcatcaatgatgtttacttctgtatttgtcggaactctaatgtctccaatatacaaagagtttaaattaaaaccacaaaatctatctagaattatagaagatacagctacacttggtggtccattaataccatggaattcaaatgctgttttctgtgctcagactcttggtgtaagcccactagaatttattccatattgtttcttaagttggattacacctataatttcatttatttatggtgtaactggttttactatgcttacatacacagatgatgaaattgaagagttagaaatatttgatactgctcagagaagagttgattgaatatgaaatttgaatactattacttaattcaggatattgcaggtatattattggcatttataggacttagaatgtctattattggatttaggatactttctatgaaggggatttctataaatacacttttaattgtaattaaatactgcttatttaccatagcaggactgaatttattaatatctaagtttggaattagacactggatttggagtgtttgtatgttgataatatccataataataaatcccaggattaaggtatcaaaatagaaatagttattagacttaaatttttataaaaaaactgctttacaaattaaagcagttttttattgttacttataattaaataactggtgtatcagataagtaatcattacttacataaccatatccaccattatactttatttttacccatccagtagcaaatatttctattgtttctactttgcttccatatgaaaggtgacctattttttcatcttctgtacttggtcctttcctaacatttagaccatctttttcttttacatactttatttttatattttcattactattatcaggcttattatttgtcaaataagacccactaacatatccaataccttcattgtattttatttttacccatccagtttttaacacatctaaaacttctacttcatcaccattatttagatatcctataacagaagcttctattgtagcatcatttcttatatttaccttatctgtattagttacatacattactctcttattgttactatttgcctgtaaatcttttaattctttaaatgcattttcatttcctccactaccaacttgagttatagaggtagcatttttattcaaaaatacactcttttgtgttgcacttaattgttctcctacgattagtacaggagaattttcttttgatgccagtactcctactgctagagcgtctataagttgattttgatttttcattccatccttagccacaaatacattgtttaatttattagatgtataaaacttttctattactttaccattagtttcatttctatctgctccacctattctttctgaattaggtaaactttgttttattttatctgatacagcattagtagagcctattatgtatgatttatttatattcttagattctataaaatctttaaagctagatataccagatgcatcagatactggaagtataaccattccattagtagcagctacagaagctatactaactgcatctgcaagacctgtgtacccatttactacagctatttctgatatatcttttaatccttctatttttttagctatactcaaagctgtttggtatctatcactaccaccaactctatcagtagttaaattattagattctaactgtttttgcacatcatttgatacagaactagatagaccaattatataaacttttttaactcctaatctttttaattctttctcagtttgtgaatttagattatttttttctgtcaataatataggagcattttttaatttagcaaatggtgttacagctaatgcatctacaatagattcactatttacaactacagcctcattcgcactactccatccttttttgcttacttcaacagcagtttggtatctgtcctgacctactaaagtattctccactgttgttctacttatttcatttgcatatgctactggtgataagcttaaaactagagctaagcatagcattgatgatattgatttagttaatttcatcttgactccccctaaaattatagtatctaaatgtttcctatttaaaatagtataacataataatttaagtaacatcattattataaaatattatttttctatctaataagcttttattcttacttgacattaatactttactcatcaaatgaattttttatataactaaagtttgtaacaacatttccttagttaatcatttaaagctactttttttaattagattatgtacaaaatataaataacaatttaaataactttttaatatattgtagttgattatataaactttatattataatgtataatgtggagttgattataaaattgatataactcaagtcatattaaaagaggtgtattttatactatggatttattgcatcttaagtattttcaaactgttgctagaatggagcacataacaaaagcatcacacaagttaaatatagcacagccagctttaagcaaaactatatcttccttagaaaaagaacttggagttcagttatttgacagaaaaggaagatatattgttttaaatgagtatggaagattgtttctaaaaagagtagatagcattttagatttagtagaaagttcaaaaaaggagttacaagacacttctttagaaaattcaggagaagtaaagatattatctcctgcagcggctaatgtgttaccatcacttttgagtaatttcagaaaactatatcccaatattacttttaatgtgtcacatactttgccatcatcttataaaaaaagtgattttgatttgtacatatcttcttcatttacaaagctaaactcagaaaatagcataactttaacatgcgaagaaatactattaggagtttcaataaaccatcctttatcattaaaggatgaagtatatctaagcgaagtttcagatgaaaactttatagttataacgaagggtgagaattatagagaggtaattgatatcctgtgcgaatcagctaatttcaaacccaaaatagcatttgagtctgattcaccatatacaatttatgctcttataaaatcacttcaaggagttggatttatatgtggaaaatcatggggattatctcaagaccctgagattaagttgttacatatcaaagatattgaatttaaaagatatttaaatctttcatggtttagcgaaaactatgaatctaaagctgtgttgttgttcaaaaactttcttatcaactattttaaaaatatttaaatcaaagttgataatattaaagaggatatatcaaaatataataaatttaatcttaatattgatacatcctctttttatcattttatattgaacttgtattatagtatagaattatatgttatagctactttttctgtctttcaaatagggtatatcttccctatacttttttatttcatctaaatcaatctctgataatacatatttttccctgtatgtatctaattgagttattacagtacctctaggattgcatattttactctttccaaatagtattaaattagagtcattacttactaaatttacacctactgtatatacagtgttctctaaagctctttgagatacatttaaatcccacatatcttcatcttgtattctccatgcagatggtataaatattatttcagaaccttttaatgtcaattctctggatacttctggaaaacctgcatcataacatatcattacaccaaatctaccaaaatcagcatcatatacctctactttttcccctcctttaaagtatactgcttctaatgaccacagatgatttttacagtattctcccataatcttaccttttctatcaaatataactgctgaattataaacatgtgtagaccctttttctaaggttccatatggagatatcaggtatacattatttcttttagcagcttctgacattgattcctctatgtacttattatgttctcttattaattctaatgttttaactccacctaaagactctaaattatatcctgtagcaaatagttctggtaaacaaattatatctgccccatgttttcctaagtcatctatcatctctactgctttttctatattttttttaacatctccaagtacactgtgttgttgaattatacctattttcaccttacgacccatgtaattgccccctttatttatctttgattccaaaacatttcattaatatataataaataaccatactcactacaattccatttatcggaggtattaagaaatttatttttgaactataatacgacgctgcaaaacctattaaccagcttattactgcaatccaatttattccttctctatgcttataagttcttccttgtataaaataatactcacaccacataattcctgctattgcaggaactgcgattcccaagaaagataaaaatgactgaaatttaaatattataccagtagctgctattattgtacctattagacctgcaactaaagtcaaaacatttctttttacatttggaaaaatagtttttaatgctaatccaccagaataagcatttgatacgtttgttgaccaagatgcaagtattaaaataacaaacgctacccatccaaaacctaaattagccaatacttctgttatatcccaagtaggtgctcccatagacattacaccagctgcaacttgttggaataatgaaataatccctagacctaaaaaactgataatccaaatatcttttactcgtctcgtatatcttaactggtcaggtgatataattgcaccaactataacaagacctactacaatattaagaccttcaaccatactcatagttgtttgaggagtataattataaatagcttcaactccataagtagaaaaagctttaaaaactccccacaccattaatatcataagtggtggtataactaagtaattaaatttagccatagctttaaagccatacagtgcaaaaacaaccataaataatccaagtataactgtaactaatgttaggtttacacttgggaatatcttttgtactgatagtcctgcaacccctgcttgtacaccaaaccatccaaaactagttataccaagtaatagagatataagatactttcctcctatctctccaaatgcccccttagctaatacatacgtatttaacccttctttgtaacctatataaccttgtatcataatgattgcaactaatattaagttccctataattgatgtaataatcatattagaaagagtcattcctaaaattaaagttcctccaaccattagttcagatatagctatgttagaaccaagcatattaaacaatggagctaaccatccaactctttcctcttttggaactggatttaaaactaattcttctctctcttgcaatattatccctccctttctttataaaagaataatttctacttttttctacttttttttcactattaatagaatttttctttatataattgtaattctattctacaaaaaagtataatatctagtttgttatcaatttgatataatttaagttataaatagataaatagtccaaatttattattttaatttaatctattaagtcatatattagacttatttcaaatttgttatatattctttaattaaaatcgtgtactcattacagaagtaatttctaaaacaatcaagtttatgtaaaatttttaaacatagtattttaattatattggctgagaatacaaggataatttatgaaaatatatagagaaaaaatataaaataattctaataaaaaaagtctgaatataaatatactttatatccagactttttacattttagtttcttgcaactacatattattcattatcttttatatcaacttttatacttaattcttctaattgctcatcttccgccaatgtaggagcatttgtcatagggcaaacagcattttgatttttagggaatgcaataacttctcttatattatcagttcctgcaagtaacataacaagtctatcaagaccaaaagctagaccagcatgaggaggagtaccatatttaaatgcttctaataaataaccaaacttttcattagctctttcctctgtgaaaccaagtgctttaaacattcttgattgaatatcagaatttgatattctaacacttcctccacctatttcataaccattcaatacaatatcataagctttcgctcttaaagatgacttatcaccttcttctaacttgtctaaatcttcatccataggtgatgtaaatgggtgatgcattgctgaaaatgtgcctgtttcttcatcttcttcaaaaactgggaactcagttacccatagtaagttatatacatttttatccaatagattaagcctatttgctacttcaagtctaacttgtcctaaagcatcaaatactattgagtttttatcagctacaaataaaagtaaatctcctacttcagcattcatttttgtaagtatagcgttcatttcttcttcattaaagaattttgctattggagaagttactccttcttgtcctactttcatccaagcaagaccttttgctctatatgtcttagcatgttcttctagtgatgatatttgttttctagtaaagtcgtcagctttgccttttacgtttatacctctaacactttttcctggttgtgtagcatcagcaaacactttaaatccacagttacaaacaacatcagatatatctgttaactcatatccaaatctagtatctggtttatctgaaccatatttagacatagcttctgcataagtcatcttaggaagtggaagtgccaattctacatctaaaacttctttaaatatcgcttcaagcaaaccttcaatcatactcataacatcttcttgctcgacaaaagacatttcacagtctatttgtgtaaactctggttgtctatctgctcttaaatcttcatctctaaagcatttaactatttggaaatacctatccataccacttaccatcaataattgtttatataattgtggtgattgtggtaatgcgtaaaattttcctggattaactctacttggtactagataatctcttgctccttctggtgttggagctattaaaaatggtgtttctatttcgcaaaatctattgtttgataagtaatttcttgtaatattcattactttatgtcttaattttaaatttctttgcatagatggttttcttaaatctaagtatctatattttaatcttagtgcttcagaaacatcatcatcatcttttatataaataggcggagtttctgacttgtttaaaagtctaagttcagttgcaaatatttctatatcaccagttggcatattagggtttttagattgtctttcgcatacttttccttttacagctattacaaattcagcccctaatttttcagctttttcaaaagcttctttatctacatctgtatcaaaaactatttgacataatccacttgtatctcttaaatcaacaaatacaagaccacctaaatttctttttttctgtacccatcccataagtacgacttcttcatttatgtttttttctctcaactctccacagtagtgagttctctttaaaccctttaaagtttccaagatactacctccattttatttaattttaatgctatatatttatctaatacacaaaacatcatactttcttattttacagcttttgctttaattcttcaactaatgtacttaattttacagtagtttgctctgatgttttcatattttttaatgtcgcagtgtcatttttaagctcatcatctccaatcactattgtaaattttgaatttattttatctgaatatttaaattgtgctttaacacttctctctatatggtctttatctgcacttatatgattttgtctcaagtcttttaataatttaaagcttcttgtatttgcttcttcacctatagttactataaatatatccgtagattgagggttttctatttcaattccattaccttcaagtgtaagtaaaagtctttcaattcctagtccaaacccaattccacttataccttttggtcctcctaattgttcaacaagaccatcatatcttcctccaccacatacagtactttgagctcctatatcattagatataatttcaaaagcagtttttctatagtaatctaagcctctaactattgttttatcaattacaaagtttatattcatttcctttaagtattcttgaagtttatcaaagtgagatttacaatcatcacacaaatggtctgcaataaatggtatatctttgatattttctttacatgtaggatttttacagtctataaccctcattggatttttttctcttctctcattgcaagtatcacacaatatatcagcttttgagtcaagatactcttttaataaagcattgtactcttttctacaaactggacagccaactgaatttatactcactaccaaatcatttaatccaacttcattaaaaaattgaacagctagtgcgattatttcagcatccattgaaggagtatcacttccaagtgcttctattccaaattggtgaaattgtctttgtctaccagcttgtggtctttcatatctaaaacaaggtgtcacataaaataattttgttggttgagtatctgcatataatttattttctataaatgctcttactacacctgctgtaccttctggctttaaggtaatttctctatcacctttatctttaaaagaatacatttctttttgaactatatctgtagtatctccaacacttctcttgaaaagttctgtatgttcaaatataggtgttaccatttcttcatatccatataaagcacatatttctctaaatttattttctacataacgccatttgtaagcctcttttggagttatgtctttagttcctctaggagctttagtcaacatttttatatacctcttctttcttcctttttatcatttcatctactctttcaatgtattgttcaacattttttacattttctactctttcaattctatcttcatctacataaacaaatttcgatatagcacctgcacctaatgcatagttactttgtttttcttccataatctgtatattataaatgcactcatatccttctttagcataacctatattttctaaatttcccaacatatgtttttgtctgtacatataatatggatttaatcccatatcttttgcatatttcattgataaatctatcatttttaccatttcttcatattgtgttagatgttctttatacctatccatatttatatttaagttggatgctctctttatggctaatgtatgaactgtaaggctttcaggagaaagtttttttatctcctccaatgtgttctttaccatatttaattcttcatctataagacctaaaattatatccatatttatattatcaaatcccattctacgagccatattaaagcaatctactaaatcagatactctatgctctcttccaatctttaccaaggtatcatcattcatagtttgaggatttatactaattctactaacattgtgtttttttaacactcttagtttttgttctgtaatagtgtcaggtctacctgcttctacagtaaattctttaattttacttaaatctaattcattgaacaatgaatttataagcaaatctaattcttcctcatcaagtgtagttggagttccaccaccaatatatagagtttcaacttctttcttagtctccttaataactttggcaaaccccttaatttcttcaatcaatttataaacatattctctttttaaatgtccaaattgttttaatgaatttgaaggaaatgaacaatatacacatctagttggacaaaatggaatacttacataaagagaaattttatttttatctataggatacataaataatcgctctcttttagctatttcaagagctaaatctattttcttatctattataaaataattatcttttagaatggttcttatgctattatcatctagctttttatccattaaattgtggacaattttgactggtctaataccagtcaaaattccccatggtacataagaattaaatacttgtttaagcactacaaacatgctttttttgatattttctttacacagctttttaaagttcctcttactttcactatctagtctattaagaaattcttcaatcgttttgctactatcaaatccatctaaaaattcaagattcatattttctatattctgtattgactcgtactttaaatttccattttcatagtattcagtacttgagaataatacaccattctcataaatcaatctatttattaaatgctttgactctatattattgttagcattagagtctttaaacttaaattcactggtaaacaattttataagttctgctacttcatacttataatcatgtccttttaaaaaaacatacaacatcaacttaactccttctatttaacagtagaagaaccccctcactaatatagttattaaatattttatacttttttaaatactaatataaaattacatgtaaggatttgtcttcttttcaacccctagagtactggttggtccatgtccaggatatactctaacagcatcttcatatttgcataatttcttaagtgatttttccatttggttaaagtctccactatataaatcagttctaccaatacttccagcaaacaaagtatctcctgtgaacatttcatcttcaactcttatacacatacatccttgagtatgtcctggagtatgcaagaaagtcatttttaattcaccaagttcaagcttgtctttatcactcacatagatatctgcatcaaactcttgcgctccacatctcattgtataacttagatttttatttttatcatttaataattctttttcatcaacatgtgcaactactttagcaccagttttttctttaatatccttaacatatcctatatggtctccatgcccatgagtaaggataatatattcaatatttaattcattttcttttacaaaacttaatgtctctactaaacttccacctgggtctataactgcacattttttagtcttttcatcacctaatacataagtatttactccaaaataactatctacaaatttttttataatcattaaagttttcccccttaaaaagatttacttgagtctaatagtattgttactggaccatcattagttaactctaccatcatatgagctgcaaattgacctgtaccaactgtcacacctttatcttttgctttttttacaaattcttcataaaggttatttgcaagttctggtctagatgcattactaaatccaggtcttcttccttttctgcaatctccatataaagtaaattgagatactactaaaagctctccacctatatccattagagataaattcatcttgtcattttcatcttcaaaaattctcagattcaatattttatcaatcatataatctacatcacttgatttatcatcatgagtcactcctaacaatactagtaaccccttatttatttgacctatagtgttttcatctactgtaactttagatgaagatactctttgcactactgctctcatagtttcctccctattattttaactctaatttgtcattctataaatactttctacaccaggaattgcttttaattttttcattagaatttttaattcctctgtgtcattaacctctacaagtaagtttatacttacaatactatccttaccttttcttgcatttattccgtttaaactaagtttatccattgcaacaatatgagttatttcattaacaattcctcttctgtcaatagcttttatttgaatttccgcttcaaacttaccttttcctgctgaactccatgaaacctccaccaatctattttggaagaaatcaccattattgtttgcatttgggcaatcagctctgtgtatggctactcccctacccttagtaatatatcctacaatttcatctcctggaagaggattacaacacttagcaaatcttactaagatattgtcaagcccttttactataattccttgtgatgcgtttttctttctctttttactgtattctgtttcacttatattgtgtttatttaaatcttcttcttgtatctgttgttcctttttagcttttttaacctcttttaaatataggtcttttaccttagataccacttgagatgacattataccgccataacctacagtggcaattaagtcctcaacacttggctgattaaatttcttagcaactaatgccatatatttttcaacaagagggtctttttgtggtatatcatgcttcttaaattctctttctaatattgtatttccacggtcaacattttcttctcttctttccttcttgaaaaattgtctaattctactttttgcatttggggtcttcactatattaagccaatccctacttggtccattagaattagatgatgtaagtacctcgacaatattaccattttgaagcttataatcaataggaactattcttccatcaattttagctcctacacatttattacctacatttgtatgaactctataggcaaaatctataggtgttgattctgctggtaattcaattacgtctccttttggcgtaaatacataaacttgactattaaatacatcttctttaagtgcatccataaactcttgtgggtcttttaaatctttttcccactccatcatctgtctcaaccattgaagtttttcttcaacctttgactctttgctagagataccttctttatatttccaatgggctgctataccattttcagctatattatgcatctcatgagttcttatttgtatctctaaaggttctccatcaggacctacaacagtggtgtgtaatgattgatacatattgggttttggcattgctatataatctttaaatcttcctggaataggtctccataatgtatgaactataccaagtactgcatagcaatcctttacattatcaaccaatatccttactgctgttaaatcaaaaatctcttcaaaagtcttatgttttttttgcatctttctatatatactgtaaaaatgctttggtctaccatatacatcacatggtatacttaaatctttaaacttatctttaagaagttcaacaattccttgaatataatcctctctttgacttctcttcattgatactctactaactaaatcataatacccttctgggtccataaatcttaatgctctgtcttctagttcccactttatcttggaaattcctaatctatgagctataccaccataaatttcaagtgtctcttttgctttatactttgctttttctggaggcatgtattttaatgttctcatgttgtgcaatctatcagcaagttttataagtataacccttatatccttcgccattgccaaaaacatttttcttaaattttcagattgagtttcttctttcgaacgatattttatttgaccaagtttagttactccatcaaccaaatccgctacttctttgccaaattctttttttatgtcttcataggtatattctgtatcttctacaacatcatgaagtaaacctgctgttatagtttcaatatctaattccatctctattaaaatatttgcaactgctaatggatgaataaagtatggttccccagattttctatattgtccttcatgcgctttttttgcaagattataggctttttcaaccatttcaaaatttgcattaggtgcataaacttttattttttcaattatttcttgtaattctttatcatgcatataaccacctattttgtataaaattttaatatatatgaaaatagttggtgttataccaactattataaaagtactagtattttataagagaattaacatcatagttagacaacttttctctcccatttaagaattttagctcaatcaaaaattgcatagaaactacttctccacctaatttttctacaagcttggcagcggcttccatagtcccaccagtagccaataaatcatctactattgctactttttgaccctttttaattgcatccttatgtatctctaaagtatctgtaccatactctaatccatactcataactctcaacttcacctggtaactttccaggttttctaattggaacaaatcctactcctaaagcatatgctacaggtgtacccatcaaaaatcctcttgcttctggccctattactaaatctacatctttatctttcaattcttcaactatagaatccactgcatatttaaatgcatctccatctttaaatagagttgtcacatctttaaaatctatgcctggttttgggaaatcatcaatattccttataaagttttttaaatccatgggaaacgcctcctaataactgctattgtattgtttttctaaattttttagattattgagtattaaactctcatttaagtctaattttttctgtggttttggcaatattcttatgagtacagaatttttttcataatttaaattaaagtcaagtaaatttaattctctaaatacatttaatatcgtaaaaaactttaatggaattacattaaaagtttcccttatatttaccatatccaaatcaatttctttttttataagtgcttgtttataaattgttataaattcatctcttgatggaactatattactaactacattctttaaatataataggtctgttttattataatattttataatttcactttcttctcttttattctcatatatatacgaatattcgcctttattgtataaataatcataaagaataatattattatatctttttaagtctattttatcaatattaggagaaaatataagctctaatttatcagtatttttgctaacatcttcaataatattgtaatttatgttaaaatccaaatctataagtgatatatctgacattgctctataaaatccatttatagaattagatattattagtgtatctttttcaaaataatcaaatatatttatatctgtatttccatcaaataattcaaaatcagacacagatatattatacaggctttgagtatcttttggtattatttttgacattaatttcaatgaaagtttgtcattacttgcacttttaggtcgagccaatcgtatatctttaagtaaaaattgtactttcctatttcccatatagttattttcatctaattggaatagtacatctactttgtctcctactttatacattgattttaaatgactcatattaaatcctatacattcatagcttttctctttttctatacttaatttcagatgttgttgattcttacctataactttcaaatcttttaaaatataatttctaactataaatctaggattaggattatttaatccaaagggttctaacttatgtaattcttctacaagatttaaatttattacattttcttgtaattcaaactcgacatttacattctctatcatatcatcttcagttaaattataatctgcaaatttatttatttcatttgctaaaatttctacattgtctgaatccaaggataaccctgctgcttgttcatgaccaccaaacttagtcatcaagtctttgcactttatgagagcttcaaatatattaaatccttttattgacctcgctgaaccagtagcctccccattttctatacctagaagaattgttggtttgtagtatttttcagttaactttgatgctacaattcctattattccatgttgccaaccctctttggctaaaaccaacactttgtcatcattgtatctgctattagactttagcatttcttcagcttcatgatacatcttagcttctatcatctgtctttcattatttttttcttccaatatactagctatttctactgcctcttcttgtgactgagtagtaaatagctctactcctaagtaagaatatcccaatcgacctgaagcatttatcctaggacctattgcaaaacctatatgagaagaacctatcttatcactttctacaccacaaacttttataagctcccttaatccaatatttttgccttctttcattgattttaaaccattttttacaattattctattttcatctataagtggaacaatatcacaaatagttgctagtgttactatttccaaataattatacatactagttttaaattcttcttttggagtcaaggcttgaatcattttaaatgctacaccacatccacatagtgaatcaaatggataattacaatcttcttgttttggatttattactgcaaaggctgatggaatttcactttgacattcatgatggtctgtaattataacatctatgcccaaatcattcgctgtattgacctcagacactgatgtaattccacagtcaacacttataatcaagtcacatcccctagagcttataagcttaatagcatcctcatttataccatacccttcttctaatctattaggaatatagtaatcaacattgtaacctatactcttaaaatataaacacaagatggatgtagatgatacaccatcaacatcataatctccgtaaatccaaattttttcgttcttctcaactgctaactttattctatcaacagctttttgcatatctttcattaaaaaagggtctcttaaataatctaaagatggattcataaatatttctgaatctttttcagtacatatccctctattttttaaaatttggcagatttccggggaaatattaagttttttgctaaattcactttcctctatcttacctttatacttcaatatccattttttcaaatttaattccccctaatcttttttgtattttgacctaatacttcttataactaagcaaaggcctattataaaggatataaagaaacccgctattgcagtaaattttatccatatattattttctatatttggagatgcaattataagagaagaacctactataatagatgccaacactaaactcaaagatatttgagatgttagctctattatacaattttctaacctcgtcattttaacatcttcaatttgcatttttatattatttctttctatattttttaaaattgcttttaattgctttggaatagtttttatgtccagtaatatttcttctacattttgtcttgaacttaaaacaacatttttagggttaaatttactcttataatgatgtttcataaactcttttcccatagaaccaaaagaaaaatctgtgtttaaagttctacttgttccttctaatgttataactgtctttgcaagagttacaaattgtgcaggcatgactattttatactgtctaaaaaacctaaatagttcatttaatatatctgttacatttattttttctatagaaatatcatagtaataatgtattagataaagtaaatcctgtctaagtcccttaatatcagcctctccatttaatgcatccatttctatcaatagatatattatcttgtcaacattcttttctacacctgctaatgcaatttcatttaattggtttaaagttttattatcaataattccaatcattccaaaatctatatatgctatcttatttttagcaactacaaatatattacctggatgtgggtctgcatgaaaaaatccatgagataatacctgtgtaaaaaatgacctaactcctatttcaacaatagtttttgtgttataacctagtctccttattttttctacatcacttaactttgtaccattaactttctccattactaaaattttcttagtattatattctgagtatactttaggtatatatacttcatcactatttttaaatatcctagagaatttagttgcatttatggcttcaaatgtataatcaagttccctcattaattgagtttgaaattcttcaatcatctgtactaaatctaaattaaaatccttttttaaatcttttaaagtatttgcaatagttctaagaatctctaaatcagattttattattttctctatatttggtctttgaatttttacgattacttcttctcccgttttaagtacaccttcataaacttgaccaattgaagctgctgctattggttcttctttaaattctaagaatatttcttctatacttaaacccacttcttctttaaatatatcaatagctatatttgaatcaaatttctctacatcatctctgagttttgatatttcatcaattatatcctggtctaacaagtcttttcttgtactcaatatctgtcctatttttatatatgtaggtcctagttcttctaaaactcttttcattctctcaccagttgtcatattttttatttcttctggtgggtcaaatagtggtattttataggcaattccttctatatttagtctttctacaataaaactaaaaccatactttattaaaacatatccaatttctctatatcgctttaaatttctataacttattctcaaatcttttcactcctaagataggtatacccaaaaacttacaccttaatttatcgtatatgacattatttcaccaattgatattctaatatcctatatcctctttaatatttaattttatcacatatactaccaattttattaaaattatttaactcagttaatttttatttttgacattttatatctggtttaatcaaatactttttgaaaactaaaatatcaacaaaatctaataaaataaattagtggttgcctcaaaacagatttaaatatgttttgaaacaaccactctttaaactaatatttttgattttgtgctgcctctaaataccattcataagattcatcaatatattttttatcttcttctgtaagctctctaacaaccttaccaggagaacccattatcaaaacacctggtggaaacttcttattagatgtaattagtgtacctgctcctatcagagtatattctcctatttcagcattatccaatattattgaacccataccaattaacacattatcactaattttacaaccatgaactatagacctatgcccaactgttacattgttaccaattatagtttctgtatctccatgcactatagaacaatcttgtatattagtgttttctccaatagttattggtccttcatcacccctaactactgcattgtaccatatacttgaatctttgcctattttaacatttccaattacatctgctgattttgccacaaatacactttcgtcaattaaaggtttatcttctaaataatctctaatcatatataaacaactcctttaaaatataaatttagttggttgctccttctaacattaacttagcttgtatcattatagagcactctgtacgttttctttgcatttcacatcctaattcatatggttttgatatgtcattattaaagtttatcgcatttgcatgacatccacctgaacagtaaaacttattccaacattgtttacactcttctttagtatatacatgagcttctctaaacatattttttaaattttctggaagtactatttcttcatcaaatatatttgccattttaaattcttcatttccaacaaattgatgacatggatagatatctccatttggagttacagaaagatactcatttccagctccacatccagttattctctttattacacatggaccttgatttaggtctatcataaaatggaaaaatttaaatccatctccttgtaattgtctatctgcatactctacagcaaatttttcgtactcttcaaatatcttaggtaaatcttcttctctaagtgcatatggattactctcatctccaacgactggctctacagaggttaatttaaatcctaaatctgcaaaatgcataacatcttttgaaaaatctaaattatctcttgtaaaagtacctcttatataataatacttatcttttgctcttttttccacaagtttcttaaatcgtggtaatgtaatatcataacttcctttatcatttaaagttggtctcatattatcattaacttcttttcttccatctaaacttaaaactacattatgcatattttcatttatataatctataatctcatcatttaacagtacaccatttgtagttattgtaaatcttatatttttattataatctttttctacacttcttccatagtcaaccagttgttttacaacttcaaagttcatcaaaggctctccaccaaagaaatctatctctaggttctttctacttcctgaattagcaatcaaatagtcaattgctgccttaccaacttcaaaactcataagttctttttctcctccaaaatcaccttgagctgcaaaacagtatttacattttaagttacaatcatgagctacatttaaacataaagcttttactacaggctctctatgtacaaagcttggatgatattgatatgtatcttctgtgtataaaagaccttctttttccaaatttaatatttcttcatatgcttcatttattttttcttcttgatattttgattttaatatctctaatatttcttctttacttttttctttataaaaatctaacaaatcgtatgcaacatcatctaacacatgaacagctccaccattcacatctaaaacgatattatatccattcatagaaaatttatgtatcatactcataccctacctcctaaattactatctatactaaagttttttattattttaattaaactttacccttcattatatcataagtttacataaaatacatacaatacaaaaatgacttactctccgtaagtcatttcattaaatacactatatccccctaaattggcgcactaatatattaccaaataggtattaggctcctataaaataaataaaataaattttgtatctgattttatattgttttaatcttattaaaatataataatttcttttttcctgataattttgtataaataagtgcttgtatttaatttgtcttctttagattgctgatttctttgggtactttaggctgatgaataatccaaggacaggtactattagctgacaaaatagcagtgctaagtgccaatgagctagcaaacttcataaatcttacaataaactttttcataacttaactctccctcatacatattttacttatactttagcttttaacttacctaatactaacatcacaaaaatccaaaacatggcaaatgcgctatatgtgaaataatctacaaatatactcaaagaaagacttaaaattgttatcaataacactactgtagatataaatatagcagttttcttataaacaaacttttccctatcacttatagggttactcctatgttctattggacacagaacacaaattccaacccaactaacacttgcaataatcataataatatttttaaataagtctatatttatattttctataattaagattgtagataaaattataaaaataaaggttaataagcatctaaaataattgtctgcatgataccctcctgaaaattgtcttattggacaataacacattaaaaaaaataatacatatgtaaatttaccaaataaaaaacctataaacagcatggtggttatattaactatgaaagctattaatatttcaaatccataagaatagactttagattcattattatctatcatattattacaaattaaaacagatgtcattttttcagcatatcttttaaacatttttacctccaaaaaaattttacatatatagagtacattcttttttgagaaaattcaatatactttacaaaactagttgttaaaaatgcaaaactggtcaaaaaaagacctatataattttcttattattatttatataacaaaacaattataataaaacaattttatcaagctttatatgcataaaaagcctatgtcaaaatagaaataaaccttttccccattgttaaaaggctaaaaatatattttatttcatataaaaagagtacctcacaaactaaaaagttcattttgagatacccattttatttattacaaaatatcaaattttatttatttgcatatattttctatatattttagccttttaactttgtttttgttttacatactgtagtgcttttctattctgttttactgcttcaagacaaactttttctgtttgattatcaacaaattctaaagctctataattttgctttactgcttctaaacatattttttctgtttgattatttacatatttcaacattctataatcttgttttactgcttttagacaaacttcttctgtttgttctttcacatatttaagcgcttcataactttgattaactgcttctaaacaaatctcttctgtttgttcctttacataagctaaagcattatagttttctcttactgcctctaaacatattaattctgtctgattttctacatatttaagaatttttccattttgctttactgcttctacaaatattctttctgttggtatctttacataacttaatatttcttttatttcaagttcttcaaatgaacctcttactgcttctatacatatattttcagtctgtttttttacatattgcaatacttttccattttgtctaactgactccaagcaaatttcttctgtttgctcttttacgtactgtaatgctcttccatcaattcttactgcttccaaacaaatctcttctgtttgcttatttacatactgtagagccatataacttctttttactgcttccatacatattttttctgtctgttcatttacataatacaatgcaaagtcattctgttttactgcttctatacatatttcttctgtttgctcttttacacaagatagtgcactgtagttttcttttacagcttctaaacatatactattactttgttcctttacataagctaaagattttccatctttttttacagcttctaaacatatggctggagtttgctcttttattccttttaatatctctgcaacatcatttttagatgccctttctataaatgctagacatacatcttctgtttgatcttccacaaatttaaatacttccatgacatcataagttgatgcattttttatagcctcaattagtacattttctgtcttattatttatgtagtacaaagctctgtagttctgttttactgcttctatacaaatatcctcattttgatttgttatatacttaagagctttatatgtctgttttactgcttccatacatactttataagtcttgtcctttacaaactcaattatagtaccatcctgctttactgctagcagacacatctcttctgtttggttttctatgtcttttaactctctgtaatcatattttactctgcttaaatcatttaaatgtactttgttatcttcctttaaatcttcttcattattttctatatcatactcaaattcttcatcatctaaatagtcatttttttctggtaaaaatatagatttaattttattctttatatccataaaattatcctcctttaatatgattctatcattaaagtaaatcgtttttaagcacttatttaattaattttatattaagtttatttaaaagtctattcattgtcgatagattatattttatattaataattttatcttatatatgtggggtaataaagttaatagtggacattttccatcccattagtatacactatttatatttattactcatttatagtgatttttttcaaattttttcttatttactatatcatatttatccaatttatgatattatttaaatataatataagttttataaagtatattaaatatattataagatggaggtcgagtaattttgaaaggaaacatagtacaatataattttgcagatatagaggaagaagtatattcgttggattatgctatagcatggaatacagatgaggaaaacgtaaacataataccatttacaaataaattctgtaaagaatctatagaatctttttgcctaggtaaaattaataactttgttgaaatattaaatgaaggttttgttgaaaatcatcattatgtacatttagataaaatgattagtgttcctaagaaaaaggttaatttagtatatcaacaagacacacatggttatcttctaagagatgataatgacaaccttattcctgcaaaaataacttcagagcaatctaaatctatatcaagtaagatggagttattctgtgctggtgaagaaaaatgtttaattaatatattactaaaggctgacccatcatatattttagatgtagatagtataaaagacaaaaacattctaaatctaggttatgagtctattgacagatataaagaatacaattttgatgatgataagattttaatattttttataaataaaaaacgttattcagtgattatgaaaaaaacaaacaactctgataacgatttagtttccagaaacaatgctattaaagaattatttactaataaagcaggaaatcttaactaatattataattttaaattatattattaattaaattaataatagtatacaaagaggctgtctcaaaatagagataagcttctttttcattgttgaaataataaaatatatttaattctatataaaagagagtgcctcataaactaaaaagttcattttgagacaccctcctatttataataaacaaataaatccttaaacctatcgagtgattataatttttagattgggttatcttgcatttttaaatttaaggtaactttctactctaaactttaatctctaatcaatatcatcaactgtaacaacttacaattaaatctttaataatcaaactttagactatctatattaaaactcaaattagatttaggatttatttggatatcacatttattttattaactagtaatcaattatttttacttataaacttattcttccctaattctattattaaatacttttaattatttttcaataccatatttttttaatttttactattaaatcacaaaatattatcttactccatcacaactacttttgatatcatttgagaatgaatcttcattttaatagtacttttattgataataacatccatatatactatagtcacaatgcagttttgctttttcacaaaatgactattacaaagattaagtaattcttagtaatcttttataaaaaagagatgcttcaaatttttattttgaaacatctcctttttaattcgtaaaatataattttgttatttagaaaaatgaattttagtaactatataacattaattatatattaaaagtcttttctatatagctttttatttcttcagcagtacccatattaagtacatcatcagctaattttttcatatctgactctttaactgaagttattaactttctagcaggaagtattgatattggagacatagagaactcgtctaatcccatacctaaaagtattggtatcattttttggtctccggcagattctccacacatacctgcccattttccttctttatgtgcattgtctataacagtctttataagtcttaaaacagctggattaaattgattgtaaagataacttatcttttgattcattctatcaactgcacaagtgtattgaattaaatcattagttcctatagagaagaaatctacgtgtttagccaatacatcagatattacagcagcagatggaacttctatcatcataccaatttctacatctttagcataagccacaccttcagaatcaagttctgctaaaacttcttttacaacttctttagcttgtaacaattcttctaaagatgaaatcattgggaacatgattcttaatcttccatgaatactagctctatataaagctctcaattgagtcttaaatatatcttttctatctaggcaaagtcttattgctctgtaacctaagaatggattcatttcaggttccatacttaaataacttaattctttatctccacctatatccaatgttcttataactatcggctttccatccattccttctaatacagctttgtatgcttcatattgtatttcttctgttgggaaagaatctctatccatgtataaaaattctgttctataaagaccaacaccttcagcatcattctttattagaccttctatatcgttaggtgttcctatgttaccagctaattccacatgttttccatctaaagttacagatggttttccttttaatagctgtaatgcttttctctcatcttcatacttagcttttaattcagtatatttatttatagtctcttcatcaggattcacaattacttcacctgtgtctccattgaaaactacaaaatctccatccttaacttttgaagttatatcatttaatccaacgattgcagctatttctaaagttctagacatgatagcagtatgagaagttcttccacctatatcagttaaaaatcctaaaaccatttttttattcatagttgctgtgtctgatggagttaaatcatgtgctattaatacaacttcttcgcttaaagcagataaatcaacaactttaattcctaatatatgtctaagtattctatttgtaacatcttttatatctgccgctctttctttcatgtactcattgtccatagactcaaacatgctaacaaacatctcttttatttcatttaaagcatactctgcatttacactttcagttttaattttatctattgcagaaccaattaactctgggtcttctaaaactaataaatgtgcttcaaatatttctgcttcctctgctcctaattcttcagaagccttttccttaacttttactaattcttctttagaaactgcaactgcatcttctaatttagcaatttcagcttcaacattatctatagattttttttcaattactaattcactatgttcaactactaacgctttccctaaagcaacaccaggagaagcacctattcctttgtaagccataaccctacctcctaaaaaatatcatctagcacataaactctataaatttatataaataatttacatttttatagttttatttacttataattttttattaaattttataaactgtttgttactgtatttttactctgaatttatgattaaaaatatcttatttcattttctaaaatatttatatttttatacccaattaacaatagtcttaatcttctgattaaataaacatgaaagtaacaaagaaattaaatatctacaaatgttggtctgtatatgtttaatacttctctgttactttactttaagtaatattagattctaaatatcaaattttaaaaaattattatatctattctccaaatccactttcaactaattcaaccattgcagctaaagctacttcttcatcttctccatttacaactaactttaattcttctccttgagctaaacctaaactcattattcccattattgattttgcatttacagttttgtcttttgctacaacctctactgttgatttaaattcagctgccttcttaacaaacattcctgctggtctagcatgtaatccacttgcatttttgatactaactactttttccattttttaaatcctcctataaactttacattttatattttttaaaattgttttcctgttttttactttaatggtactaagtggtacttttttgtcctatggtcattttttgttcccactagtgctacaaaaatattatactactaatatacacttttttcgagtataattacaaatttttttttgttttttatttaactttgattttttatgtcttttataatacaatttgtcaataattttgtgtttttgttctttttaatactaattttaggtctaacttcaaaattagaagctaaatttctattagaatcaatatttgtatttacaacatctataaccttgttaaaatcatataattttatcctgtttatattattttcttcaagtttcttttcatatatacagtaaaacaaatctttatatgaaaagtcctttggcaatccaagcacctcaccaagctttggtattacactttccataacagttctaagtgaagcatctctttttatattcaataaattacagatatattgtattgtttcattgctcatacttctaaatttatcaaaacaatattcttcattatatttatactctacatcaaaataatacttaattccagtgcatctttcatatgctttcatagtatctaagtaacctagtcggatgtttttttctacattatctctatctttattaagagaacctcctagatattctgatggtattatagtttttatatttatattttgatgtcgatttagattcattttcccaataaaatcatcaatcaacctaattacaacaacatcttcataacctttgtcttccaagagtcctattggcatgttatcacaaaacattccatcaagatacaacttatcatccatcatgttcgtttgaaaaataggcaaactggaactagcaattaaataatcaatcaatcttcctttaggtatatcttcgatatacaatggatatggattaatttttttatcccaccagaccgtaacaagtccaaagtctttttttgatttccttattatgtcttcatttaatgttgtctccattagttgtcttaatgggcttatatctataccttcattttttctagctttatttataagctcaaacactgcattgagatttttagtagtgaaatctacatttttaaacctctcataggtttctctatcaatattcataaaatgagtatagtcataatttaaccaaatatcttccattacttcaatatcattttgaattatatatgctccatttaaagcaccaattgatgtgccagttactccttgaaactctataccaagctctcttaaagctttatatgcacctatttggtaggctccttttgttcctccaccttctaaaactaatcctttcatattatcacctactatatcaaaaacgtttctgatttttattcttaagcaaatattaattcaaaaaactatttttagttattggagaaaaataaaattgcacaaattcattcttattttatcaaaaaaatattgaaaagtatatatttttaatattttttatatggctaactttttatttctaaatttaaataaacaattaaaggattataattttttaatacttacaactgcttatatacctaaagaatccattatcaagttatccatttttatctgcaatttttctacttttcctttatctatagacttatttaataaaattgatattatttgctttgataaattctctatctcttcataattattatccctaaaaatccttatcttcataaccttattaggatagtaatcatatatatttttactcatttttttagcagttattttaaagtatttatcataaacactggaatttaaaattccaactagatattcatatgaaaatttatctaaatactcttcttttataaaaaaagaatatacatctgcacttgaaaaattgttatcataatctatagcaaatctattttcatttgatttataaggatacattatcttttttctttcaaagaaaagcttttctctaccccattgaagttcataccatttccttattccacttttacattctcttctgttttctaattttgttttatatagccctataatttcatctagtatctttttatttgtattctcattatctatatcatttgagtatattagcctatattcacttttatctactatatatttatttatattcttactttttatccaacattttaaaaatttatcatctacaaggttcaactttacatcatctttacttaaaataaacgctttatcacaccctgtaattattccttgaaaacttattgctatatcttccaagctatatttacatttttcttgtatcttattataaaaagtttcatcatctttatttacaagtatccattcgtcagatagcaatctctgatttatattaaaatgttcaaatttgctactctttagaagttcttccaatgtttcaaatttatttatacatatatcctcatttttgattttaaatacatctatatatgtctcttttgtttttttcttatcaaaagttagaatacaactagatacccctatgtttttaaatatatttgcacctaaaaaatccactatttcttgaacattgacatttgatttaatatattctcttaaatctttacctgatagactttctaagaaatatcttggagttataacactgccaacccctccttgctttaaaatatctataatttttttataaaaacaaaaatataagtcagctttatccttataaacttcactatatttttctaggagaaattttttatatttcttttcaagttttttatgaccaatatagggtggattacccactatgtaatcaaacttatatcgccatttctttttaagactatcacaacaaaatagattaatctttatatcagattcatctaaatcatttactacctttttatttgttaagctatcttttaatatacttatagctttttcatcaatatcagcaccatatatacaatagtttaatatatgacggtgtatgttatcaacagtccaataattttcatcatacttctttttcaattcatatatattttcctcaaataagtcatataaaatatcatatacttctaaaagaaaatttccacacccacaggaaatatcaagtattcgtggatatggatttttaattatatcgtgattttttaaagttttttttacaatataatctacaattattttaggagtataatatattccacttgcttttttagtatctacatctaagctattctcatactctttagacagtagaaaattatcttgagatatatcatccataaccgaaaacctccaattattatcatagctgaaaattttttattctagtatttgtcttatagattttctcgataaaagtttataaatttctttttctatttctagcaattcacgatttactttacaaccttttaagcaattactgcaattagatacatatctcgtacatttatttatatatatttttccatcaattacttctacaatagttcttagacttattgtatccaatgacacatttaacatgtatgtcttgccatcttctttgttaaaagtaagaatattgtttgcacaaagctttctaagcagtctgtatagtgttagtattggtatatcttcactttttaatatcattttagcatctattggtttatcttctccattattaaatatagctcttatgattcttattgaataatctacatcttctgaaatcatccttactcctcctcaactgtcatgcatttatctaaaagagtatctttcagatttatataacttccgtcagtaagaagttttttataattcatctcatccaaaggtttaaaaaatacataaccttgtatgaaattacatcccagttcacttaagactttgacctgatgcatatcctctaccccttcacatataacagttacgtttaaatcatgtgaaaggttaataattgctttcaccataaactttgtttttgtatttgtaactatatccaatataagtgacctatcaatttttataatatctagtggtatccccttaagattgataaaatttgaattacctactccaaaatcatctaatgatatattcatacctaaagatttaatctcataaagcctttcacttataaattttacatctcttagcgctgtcgtttctgtaatttctaattctataagttcttttggaatattatatgtattaaacatcagtttaaaaaaatcaactaaatcatttttatatagttctactctagaaagatttattgagactggtaagacatttataccttctgaaatccacttgttaatggtaataaaaacttcttgaattagccatctaccaatattgtttatcagaccatttttttcagctataggtataaacttatttggtccaaccatgcctaatgatgggtgcaaccatcttatcaatgcctctgaacctataatgttacctgtacttgaatcaactttaggttgatagtgaattacaaactctttatttttaatagccaagaataaatctctctctattttcataattgattgtatttcttcttccatagcattatcaaattctacatactctatgtgctttagtccttttgatttaagccttgccatatcagcattatctatagctttttttatatcaatttcattattgttaaatttataaattccaatagaagcctcaatatttatatccattttaaaactgtcaatctgacttaatatcataattttattcttgataagatttactaaataaggaatcttctgttccctattttcaagctttattattaatacaaaaacatcactttttaactttccataaatagcttcttttccaaaataattttttaagttacttaaaatattatttaacacttcatcccctagctcataaccatatatatcatttataagtttgagtctacataaatcaaaacaagccattacacagttttctttttcattactgataatataattttgaacatgttttaggaagttctcatctttagtaatatttataaacttatctgaattatttatcaatcctaaattaattttatcctcatacaacttaattttaagatatgaaataaatacatttatactaaacaaagttaataaaattaaaattaaaactttaatatctacctcaatatgtcttgtaagtaaaactattcctaaaattccaattataataaaaattattttatttaaactgtaaatttttgtcatgctatttttattcatataaattcccctattttttaaattatcttacagttaaactttatatatactaattataaagcacaattgatagcaaatcaatgcaagttaaaatcacatataaataactacattacattatactaaatttatttttttaaattttataactataaattttttgcaaaaaaaactatgaaattagatatagataaaataatttctaatttcatagtttctaaattcaaacaatgtttccaacattacgaaataaagttaatacaatttacacagttaaacttttaaatttatcctcacattaaagtaaagttaacttacttattccctttagaatctaggtatgaaagtacaccttgaacaattccttccgcaagttggtcttgatatttttcatttattattttttgttcctctgaaggtgttgttaaaaaaccacactctattaatatagcaggcatatttgattctctaagtacttcaaagttattttcaactattcccctatctctaactttaacataggatactatagtactttgtactgtctgtgcaagttcttttgaaccatctgtagctttattcctataccaagtttctatacctgttgctgtattaccatttttctctgcatttaaatgaatagaaacaagcacatcagcagaactattatttgctaagatagctctatcctttaatgatatatatgtatcatcagttctggatactactacttgaatatccttttgtttagataatttatttgctaatttttttgcaatttgtagatttaggtctttttcatatctattactggtcttgctttcagttcctttatcattgcctccatgacctgggtctataaatacagtatattttttctttttattttcctcttcattaccaaggtcaaattgttctgagttaactttttgttgttgactagttttattacttttatccatactttttaccaaagctactacaccttgagtagccttaaatgcaataaataaaaataaaactgtaaagcaaatcaacactgctaactttttcttatttaattttcgcttttttctattcagatgactggtctttttagatttgtttcttgaattattgttattattgccttttgacatttcttcacccttcttggtataaatttttacacttttacatattattagtgttattttaccatcaagaagtttttttttcaataatttaaaacactctacaaccttaaatcagaatatttttaattatccacctaaagtgacatcttgtgtatcataccaactaaatgcgtcctttatatcgtcactcttaaaatctggccaataattatctataacataaaaatctgcataaattgattgtacaggaaggaaaccacttaatctccttcttccaccccatctgattattaaatctagtctggatacatcaaatgactgtatgtaatcctgtatattatttttatttacattttctactcctgatatattatttaagtcccaataccacccataatttaccagaagatttgcttttatttgaccttctttggctttaattctattagtatatggtaataattcttctggaaacattggagattttgtatttcctacaactaataaagcagcaccttcatctattaatatatttgcagcatcaatacatgcttttgtaaaagcttttgtctgcactgatggacgtcttgtattatcagttgtaaatccataaaaagtcacctcttcacagcctaaatctctacataatctataagactctaatccagggtctattccactttcatatcctttatcttttgtcataccattttgacttgcccaccttctatttccatccggtataattcctacatgttttggtattctcatttctaatcacctctcaataggtattattatcaaaatattacattattaatcaaaactgtaacattaaatacatttatttttatataattatgtagtaaactaatttaagacagagtttaaaaaacttggaggtttatcatgaaaaaaattttaatattgtttttttcgataatcttatcattaggaatggttagttgttcttcaagtggtgattacaaaaacgtttctacatcaaaaataaaaaaagcattaaaatcttctgatttacttataaaagaatcaaaaatctttgatgcaaaggactttaactattttaatgatgtagaggaagacataattcaaggttttgtaattaattcttctgaaaaattatctctagaagatattatcgttataaaaactgacgaggtagataaaatatataaaactctagaaaattataaaaaagatatgatacaagcaccttttggagaaggacatggagaaaaaatcaattctgaaatagcaaataatactataattgagaaagcaggtagatatgtttatttaatttctgctgaaaatgcaactcaaatagaaaacaaaatactgaatatcataaaaaaataaatatctattattgatgtttattaaatatcaatgtaattttcgcataaataaacttatttatcaaaattacattgatatttttttgatttcttcaaaataatctttttcatctatacatatgactatccaatttttatgacctcttttatcttatctacaacgccattttcagtatttctttttgctctaaatctagcaatttgtttcaaatgttcatttgcattttccatggcataactatgataggcacttttcatcatttccacatcatttaactggtcaccaaataccatagtttcttcatattttatatctaacattttttgtactttttttatggcactccctttatttgcaccttttgcagttaaatcaagccactccactccagaaatacatacttgagctctatcagaaaacttttcaaagtagatattattattatgttctgcacctttgaagtcaaatacagctatcttcaatatatcgccttctactttcgtcaaatcgtctacaattttaaactttgcataataagtactaacctcttgtataaacgcttcatctttgctttctatataagcgtattttttcccactcattacaatttttttcccttttatacttcttgttgtctctatgatttcatttactaattctttatttaaaggatttgataatatttcttttcctttatatactactagtgttccattttctgatataaacatcatatcatcttttatatcttcaaatttttttataagattttgatactgcctgccactagcagcagaaaacattatccctctctctcttaattttttaaatactttataaaactctggatttatttcgctcttttcatctaacaaagttccatctaaatctgttgctattaattttatcatacatttcctcccccaaattattaatttataattattttttattaatttttatcggtttgaattttcaattcttattatacactaaaaattttaaattacaatttacacctttcataagatgctataactacattcaggaaaatatttttttcaatatacacatcagtttataaaaatttaagtcttcatacaattatattccaataaaatcaataataactacacactttcttctataaaatactataaaaataattatattatgacaaacttatgctaatttattgtgttttttattgcttatgtaacaaatttttaatataattaactatgtgtaattaaaaaatttagaaagtaggggatattattgtcaggactcaaaaagttcgttatatttctagcccttttagttatagcatttcctgttagtatatatggatatgtttttactaaattaaaaactatacaagatgatagtataaatacagaggcgcttagtagtaatgactataaaaacgaagaaaatatcacaaacatattattgttaggtacagatgcaagaccaggagaagaagtttctcgttctgatgccatgatgatacttactattgataataaaaataaaagtcttaagctaacttcattaaatagagatacttatgttgatataccaggacgtggagaacaaaaattaacacatgcctacgtatatggacaagctaacttattaatagaaactatagaagaaaacttccaacttgatatacaaaactacgccgtagttgactttttctcttttatggatatagttgatgctttaggtggagttactgttactgttgataagagtgaaataagagaattaaataaatttattcctgaaacttataaatggaataaaaatgacaataaaggttctcttaaatatataagaaattctggtgagcaaaaattaaatggatatcagacacttgcattttctcgtataagaaaaaatgatagtacagatgaaagagatagaagacaaagaagtgttatacagagtttaataaatggtgttaaggatttaccagtcactaaatatcctaatctagttaacacaatacttccgtatgtaaaaactaatatgaatcctaatgaaataatatctttaggaaaagaacttttaagtataggaaatttaaatttgaaatctatggagtttcctctttctactgaaaatggtagaaaaataggtaatgcaggctatgtaataccttttgaggaatatgaactagatgcaatgcatgatttcatatttaaagatattatggttgaagattagaaattccaaaacaaaccaataatttgatgataaatacatacctcttaaatgcaaattgctttgtatttatggggtgtgtttttattttaaaatataaattacttttaaaaaatatattatatatacttttaactatacatataggtcgataaattttcttataaattatatcattgtcttttttttgtaactgaaacaagtattgaatatatctcaatactttaatataattaagtgtatgctattaaaaaatatacaggaaaaagaagaaagaaggggtacttttgtcaaaattaaagaaatttgttatactactggctttcttggtagtaatattccctataagtgtctatggatatttttattataaattatctgctattcatgactcgagcataagtagtgatttattggataacaatgaccataaaaatgaagatgggataattaacatactacttatgggaacagatgctagaccaaatgaagattcttcaaggtcagatgctatgatgatacttactattgataacaaacacaatgatatcaaacttacatcattagctcgtgatagctatgtagacatccctggtcatggtaaacaaaaacttactcatgcttatgcttatggacaagctgatttattaatacaaacaattgaagagaattttaatattgatattcaaaattatgcttgtgttaatttcgaatcatttatgtatataattgatgctattggtggcgttgaggttactgttgaaaaaggagaaatacgagaactaaataaatttattcctgaaacttataaatggaataaaagtgatgataaaggtagcatacaatacattagaaactctggaaagcagactctaaatggatatcaggcactatcttttgcacgtatcagacacaacgatacagcctttgctagagatggcagacagagacagattatacaagctataatcaagaaaacggaaactttacctgttactaaatatccaggtttattagatgcagttcttccatatgttaaaactaacatgaagcctaatgcaatactttctttaggagctcaagttttaaaaatgggtgacttaaatattaagcaatttgaatttcctattgatgatgaaattcatagtacaggtggtatatatggaaaagctggatgggttcttagatttgacccagatactttagacatattacacgattttatatttaatgacatagagtttaaacaataaaaaattcaacataaagtttattaaaaagtataagattaattactaaaaaagaactatatcgcataattattttcaagttgctgtgtacacttgattacaaaatgcatatagttcttttttattttctaatttatgatgataattttcattttaatctacatttataaaatactctgtattttaaattaacttttttattacttaactaagtttaagaaagtgtttaatgtgttttgatttataccatctccagcttcgtatactagagcagttttcttaggctctaaagcagttttctgagcagatgttacactatttccaagcataactactggtgattttaatttagctgctaaaggacctgatgttaatgcatctaccaattgattacttttacttacaaacattgatgaatattcagcatttggatagaatttttgtattacttttccatttgtttcttctctattttctccagctattctatttttagatacatcatttgtaatgaccttatccagcttatttattactgaatcagatatacttagattaccacctataaaataagcatcttttacttttaaatctgatatccaattgtaaacttcatcacttacattatcttttgatactagtactattggttgcttttcttctcctgcttttgaagctatagaaagagaatctgcttcacctgtaccacttgttatatatagtttttctactggattagtttttactaattcttttgctatcattaaagatgtactatatctatctgaaccaccaactctatttattgatacatttgacaatgtatcttttatctcactctcaactttatctccaatagagttatttcctccaattaaaataactttacttggattaagtctttttaactcattcttagtggatgtaggtatattatccttatttaccaatagtataggagcatcatttgatgtagcaagtggtgttgatgttatgccatcaactatagagtacccatttactaatactactgtatctgaatttgtagcccaaccttttttacttattgctactgctgtgtcatatctttcgtcgcctcttaatttctccactttaacattagatggtggagtaactggttcttcactactagaatataaactctttaaatccttttgtatagaagtactatttgctatatctttagctgagaaatacatactaccttttatttcactatactttctatttaatgttacttgttgtactatttcttttgctatattttgtccaccataactagattgaccttgcttatatataccttgtcctatgtataagtctacatttgttccttttacttcattagcccaccatgccactaatttagaataatctgctgctttaagaccaattggccagtaaagttgtggaactacatagtcaatcaatccttgttttatccatgctcttgtatctgcatatgtacctacataactttcattacctgatgtatctgaacctgttgggtcactactcttatttctccatatacctgctgggcttacaccaaatacaacattaggctttatactctttatagacgcttttacatctctaagtagagtatttacattttctcttctccaattatccttattttgtccttttccatatttttggtatgttgcagtatcattgaaacttactcctggatagaagtaatcatcaaaatgaactccatctatatcgtaattttgaactacttctgctatactatccactatgtactttctaacttctggtaaacctgggtcgtagtaatacttatttccatgtttaactacccagcttggatttttctttgctggatggtttgctggcaatttatctatgctctcatctgccatagttattctatatggattaaaccatgcatgaaattccattcctcttttatgtgcttcttctattaaaaatggtaatgggtcatatccagggtctttaccttgtgtaccggtaagatattcagaccatgggtttatatttgatttatataaagcatctgattttggtcttacttgaaccactgctgtatttattcctacactttttagtttgtccaataaatctgtgtattcctttttttgcttggcttcattattcttagtcttaggccagtctaaattataaactgtagatatccaagcagctctcatttccttatcatttgatgaatcggcaaatgaacttacactacacatagtaagtgtcattatcaatgataatactaatatacttatttttttcatttcatcccccttaattttttaaatttattttttctacaatatacttcttattaagtatatctaaaattcatattatctgtcaaatattgaataatatagttaaaatttatatttgatatttgattataatatgaaataatttattataaaaaaaacagcaaagaaatttatcttctttgctgtttttataacgttcatcactattttaatattactaaactcttaaatctctatgtaaaacattaaatgtaattatatatttaatgttaatattcaatcctatgtaaatcaatatctattattattgtaaaacacgtgtagcagttataagtcttcttgcataattagttcctggagccatgctagtaacttttactacatctcctgtttgtggtgaatgtatgaatttagaatctcctacatacaatccaacatgatttattgaaccacctgaaccaaagaaaactaaatctcctggttttaattctgctcttgatactttctttcctactgttgcttgtgatcttgatactcttggtaaattaacccctgctccatttttatagacataagaagtgaacccagaacaatcaaaagcatttggtccagttgctccccatctatatggcttaccttgttgcttaaatgctaagtttaaaacattttgtacctttgcatctacatttccaccttgaatagttaaataatctccatttacccatcctgtaacattgtcaacactttttattttaatccatccatttgaatgtaattctaaaacttcaactttgtctcctgtgtttatctttcctactactgcatcatttgcactagctccacttcttacatttaaaaaatcacactggtctactgttgcactcataggtgaattagttggctctgctgcactagccgttattgctcctgcttctactgtgacaactcctgctattaacaccatagctataaattttttcaatatatgttttttatttttaatattcatcataatctcaaatacctaatcctttcgaaaatttaacattttgttccttcgtttccaattcctaattaacattctatcttacatcaaaataaattgcaaccttttttgtaatctttttgtaatctttttgtaatcttttgtttctttttagtatatatttgtttctttttgctccccctggttacaaattagaaatatattctacttttctctagttgttgcaatttctttgatattagcatcttctggtttaatataagttggcactaattccctcataataccatctattttttcaacctcttcattgttagtaatttctcttaaaagttttaagtattttgttattttttctctatcaacatctattggtctaccaataaaaatctttttatgctctgtatccaacagaccttcttctgacataagtagttcttcatacaacttttctcctggtctaagaccagaaaattcaatttttatatcaacatctggctcaaatccactgaatttaattaagttttttgctaaatccaatattcttacaggttctcccatatcaagcacaaatatttctccacctttagccatagccccagcttgtataactaagcctactgcttctggtattgtcataaaatatctaatgatatctggatgagtaactgtcactggtccgccatcttcaatttgcttcttaaaaagtggaattacactaccattactaccaagcacatttccaaatctaacagcaacaaattcagtctggctttcagcattcatagtctgtataatcatttcagcagctcttttagtagctcccattatgttagtagggtttacagccttatctgtagatataaggacaaatttcttagctctatattttgaagacaagccagctatgtttaaagttccaaatatattattctttatagcttcgccagggctcgattccataagaggaacatgtttatgtgctgctgcatgaaataccacttctggtttatatttattaaatatttcatccattcttttttcttctcttattgatgctattactgtctttaaatctaatttatttttatattttctaagtaattcttgttgtattgagtaagcattattttcataattatcaactataataagctctttaggattaaatcctgcaatctgtctgcaaagctctgaaccaattgagcctcctcctccagttattaggattacttttccctcaatgtaattacttatctctcttaaatttgtttttataggctctctacccaacaagtcttctatctctacttctctaatctgttttatatcaacttttccatctataatttcgtaaattcctggtattgtctttattttacagttagtgtttttacatatatcaataatctctttttttctacgtttctctatgtttgctattgaaaagattatctcatctacattgtacttttctaccacagcttttatatccgaagttgttcctacaattttcacattatggattattcttccaattttatctttatcatcatcaattatagccactgctacttttttaagttctgaatttctttttagttcctgtataaccatttctcctgcatctcctgcaccaattataaggatatttgaaacctttcctctagaatatgtcttgttcatgactattcttatagctctataagctattcttgcgccacttgtaaacattataataaatattgtatttaatacataaaacattataggataatcaaaccctaataatttatttattatataaatcggaattaaataagctaaagttgccacaaaaatagatataatttcttcttctcctgcatatctccataatgtgttgtagcacttaaacaatctaaatgatactatatgaagtactatatatatacacactgaaattattatatcattagtggtaaatgcatttaaattacctgtcaagcttaaagacattcgaaacgctactagtacgctacaaatatctagaattaatagtgttaaatgtctaaatttatattttttaaaaagcctattaaaaaagctttctttctctaaatctatactttctcgcataactagaagccctcctttaaacagcaaaagctacgcacctaagcatagccaacaacatctatcttttgctgtattttttcattttattttttatatttatcaaatatagaatcataaattttttctatatcattaaagtttaaattaacctcataattttctctaacaaattgacgccctttcttacccatattaagtctaagttcatcattttccattagttttattatagcattttttatttcttctggttgttttggttctacaattaagccagtttcattttcccatacagattctggatgtcctcctacatttgtaactataacaggtacttcacatgcttctgattctatagctgccactccaaatccctctcttaaagaaggaaatacagttacatcaaaagaattaaaagtcttgcttacattttctggagatattcttcctaaaaactgaacatcattttctatacccaattctttagctaaatttattaggttgtccatctgacttccagagccacctattttaagaattattttcttatctttatattcatctttaagcatcttaaatgcttgtattaaatattctattccatattttttttctaaactctttataattcctattacaaaagcgtcttctttttctacttccataggcttaaacctatccatatctactccaaaaaaggttacatctacatgtttagctgtatatttattagcctctttagccatatctctactatttgaaaagatatagtctgcttttctaaagttatgttttataatttgtttttgtataaaaccattattagggaaatcataaatatcagtaccccaaacagaaataatatatggatgatacccaagtagacttcctataaatccataactacttgcatactgtgcatgcaatatatctggctttatttcatttactagcttctttatctgctttattgaacctaagtatcccgtttttttagaaatattttcattttttaattcttctacattagaaccaaaattataaatttttattccttccatgtgacctccatttaaagagattacatgaatgtcatatcctttatttttaaaaaaactacaccattttaaagtatgaggatttgacccatcagctaaataacaaacagtcttcataatatttaccttcctatcgaataatactcaattcctaactcttccatatctttaattttataacaatttcttccatcaaggactaaaggatttttcatcttttccttatacttatgtatatcataatttaatacatctttccattctgtcattataaaacatatctctgcatcttctatcgcatcatctacagaatcagcataaagtatagagtcaccaaatattttcttagtattatttacaccaattgggtcgtatacagtaactcttgcccctctttcaagcaaatattttatatttggtatagatggtgcttctcttatatcatcagtgtctggtttaaaagtcaaacctaaaacagcaactttcatatcttgaaagctctctactaacttagatgcctttctaactaatttaagtttttgactttcattaacttctattgcagcttttactgtttttaattcataaccattatgttcagataaccagtgaagagcttttgtgtcttttggaaagcaagaaccgccataccctattcccgcctttaaaaacttacttcctattctatcatcataactcattcctaaagctacatcttctatgttagctcctgctatttcacaaagatttgcaatatcattcataaatgatattttaagagctaagaagttatttgatgcgtattttatcatctcagcactatttctatttgtaactattataggttgattaaaaggcttatagatttcttctaatatttctctagcccattcactttctacacctataacgattcttgaagcatatagagtatcttttactgctgttccttgtgataaaaactctggattagatgcaagctctacttttacattattttttaggtttctatttatataatcttctatctcttcatttgtaccaattggaactgtagattttattactactagagtatcttttgtcacagtttcagctatttgctttgcaactgcctttatataatctaggttggctgagccatcacttctctcaggtgtacctacagctattaatattacatctacatcttcataagcttttttatagtctgtagtgtaatctattcttcctctgttgtaatttttaaccataagttcttctaggccttcttcatatataggtgctattccaagtttcattgatttaactttttgttcatctacatcaacacagactacattttcattgcctacctctgctagacaaacacctgtaaccaaacctacatatcccgtcccagctatagctattttcatttttttacctccaagtatataaaacttatactctttttttaatggcattaaaaacatagaaacaaaatacatatagactttttggtaaacttaaattttcaacatttctataagtattccaagttcgttttaatgcttttatcttgttacttgatatagaatttccaactaatctgtaattcactaaatcctcctgaatcccatatgcatatttttcctttttaagtaactgtaaccaggtcgcagtatcttgtcctcttcttaccaaaggcatgctgaactctcctacaatctccttatcaatgaccactgtagaacatcctattatagtatttctaagtaatccttcatagtcaattttcttaggagctcttgcaaccttattcgtttttgacccatcttgtctcatatatctataagatgtaaaagaaaaacctacattttcttttaacatatattctatctgaatctctaattttctactatcccataaatcatcactatctacaaatgcaataaatcgaccttccgcattcttaataccaacatttctagatactgcagctccagaatttttttcaagctttatatattttattctagcatcttcttttcgaaaactttttataatttcacttgaattgtccttagaacaatcatccactaataaaagctgccaatttttataagtttgattttggattgactttatcgtctctgataaaaactcttctgaattataaacaggagtaattatcgatactaaaggctcattcatatttttactctccttatatagcaactagcagtactataccaacaagtttacttagatactaattttctttgtccaatatatttgtaatatcctaatgggaataatgctaaatacaacaatttatcagatacttttcttaattcaccaaaataatgactatcagacaacaatgagtatctggctaaatttatgtaattttttatccacatatatggatatctacttaatggatatgtattttgatttattaaatataaaaactctaatgctctacctcttaatgcatttttacttaatatattcttagtcaaaccatcatccaaataatctcttattatcataggtttatttacacatataactttatagtatttagacatttcattccatactacactttctggtaaaaatctcacttcttttctttctggaaaaggaaattttataagctcatcagttacaaatactatgcttttatctcccttaacgccatacttaaaatataggtctgcaaagtgacatattttcttatcttcaggcatttctgtccctatcaaatctccacttggatatacacaaagtccaacaactccactaaatccttctttattctctaaagaatcccactcatcattagcaatttcaagagaatctttaattaaaccatcatcactatctacaatgaaaaatagctctccatctgcattttttacacctagatttattgcagtatgttttcctccattttctttgtatatatatcttatatttaatttattttctgatataaatttttcaactaactctttagtactgtcgctacttccatcatcaacaatcaaccattcaaaatcattgaaatcataagtttgagcttttaaatcattgtacaaattttcaagtaaatgagctctgttatacgtcggagtaaatacagtaaatttatatttatacattaattaaatcttcctctctgtctaactttttttgattccgtttattccataattaataaagtagtatatagctttgtataaaggtattttttctatatttctatatatattccaagtccacatagcagcttttattttattaccacttagggaattgctagattttctatataatgctagaacttcatttattccatgagcaatatgcccttttttcaatatcgataaccataaaacatagtcttcatgtcttacaccactcattcttatttcaaaatccaatttagacttatcaatcacaacagtaagacatcctaagatatttccttttaataatcttttataatctacattaggtggaacttttattactttgtttaattttttatcattttcatccatcagttcatatgaagtaaatgaaattacatagtcattttctaacataaaatttacttgtttttctaacttactgctattccattggtcatcactatctaaaaaagctataaattgtcctgttgccttacttagtgctaaatttctagcattagagacacccttattagtctcagtctttatacattttattctactatcctgttgcatataagatttgactatattaggactattatctgttgagcaatcatcaataattaacatttcccattcttgataagtttggtttaatactgattttatggttgcttcaataaatttttcagaattatacatgggagtaattatagatactaaattcttcttcatattaccttcctcatcatttataaaatatttatttaattttacttaatacacaatcatatatcctcttgcagttcttattatcattatatctgaaaaacttatttctttcatttttttggttatccataacctcaaaattattttcaataatatcaataagtttattcacggcttcatcattattataagccaaagacccaaacatttcactttttaaatctatatatgaatcaactttttccatatattcatccaaatcgaattggtaaaacaagataggtctattcatatacaaaaagtctatggctacacttgaataatcagttatatttgcagctgattttctgatttcatttgctagagttacccctttatctaaaaacacaattcgttttcctgttatattttcttttatatcatctataaactcatgcataagatgatgcatataaatttttacatttatatctttctcatctaatattttatttaatttgtcatcatttaaaaaattcattatatttttaaaataatctgtatccgtaaattttcctgaactaaattttatccaatctctccatgtaggagtatataatatatctcgagtttgtgcaacttcatttgttggtaaattgtcatatcttgcattcccaattatataaactgagtcatctaacattccccaatcatttaccataacatttctttcaaattcagaacttgctgtaactatattatagcttttatataggttatctataatatttttgaactttttgttcataggttttctttttttaaagcttatagtcccatgatttaaaaacacttttatcgtttttttatgaaaataattaagaacaggtacagcaaaattgtatggtgctatatctgctgatggtgcatgtgaaaatactatagcttttgaattgtaataatacagatagttttctacacttcctcttattaattttttgcctggaattttatcaaatactttactgtctttatttactacccaataagtttctacatcattatgttcttttagcatatactcataaaaaaactttgaattatcattgtatatatcccctgaatgtccacctataagccagatatctctaccattaaacttatgcttattaaatggatatataaaaaaagccaaaagcatatttattaaaaatttaaccttgtccataaacaccatcctcattataacttgtactgtctaaatccattaattcttccttttatagtggcactatgataatctctattggaactcaatataagaccccctatatttcttacaagttttgataccataacttttgcaaacgtataattttttctatagactatttcctttttgcaaagcgctccaaagcctcttccataattataatctttttgatacttttctttagatttagaatgtttttttgcaggatggtaaattatatcatttccaaagtattttcctttaaaacctaaactcaataagtttaaaacataatctatctcttcaccagcaccaaactctccaccaacacccaatttttcatcaaatcttgtataatctttaccttcaaaatcaataaaaaaagttatggatgttatagtatccaaaacgttggaacttgtgatatcacaagttccatcatacattttcttaaatgcatcaactttatttgaatccatagttttgcaactgtatattttataatcttcatttttattaaagaaatttataactttttctaatgtatcattttcgtagacacaatcatcatcagggaaacctataatttgccctacagcattatctatgcctacatttctgttataactcaatccttttttagagctttttatatactttatatctaacttatcaatgtatttatcaactatttctttaactttgctattatcattttggtctactactataagttcaaagtttttgtaagtttgattttctaagctatccataagtaagtatatatcatcatatctatttaatgttggcattattaatgatattaacattactacctcctacttttcatcttccacaaatctatttcccttttatcatttaatatcacttcttttattagtaatactactgcaaaactaaatgaagcttctaataataaattttctgcaaaagagtatagtaaaaatataaataaagctactaaatatgcttttttatctttttctataaagctttctattcctttatacatcaaatacataaataatatacaagcaactactcctagtacactaattatatatacataagaactatctaatggattagttgcttttatagcaggactatatgaatttccaaaaggttttagaaaattccccttttcagccaagtatacatgccagaacttaggtctacttgctaataatctatttaataaagtgcttttatcaaatattgtaccaataattacactaaatagagtaagtattattggtaatgtctttaggagcattggcagtccttttattttttttatatctatccatcttattatttctacaaatattaatcctgctaatatagtgaaaaatccagttctactatatgtggtttgataaacaaaaaatgcagaaccaaataaaattattctatcccatttattataatctttatatcttaagaatatatatgctgcatatatagtaaccatatgataaaatacactatttggattaccaagtccaaaatccattcttgtaacaagcatatctattttttctatatatctatagtggacttcctgattaaatattaatgaaggaaataaattaaataataatatagctaccattaaaaaacatgccgatattattaaataatttttaactataaatttatcatctatttgcttagctgatacagctaataaaacgattaataatatagctccttccctatttaataaataaagtaagacacaaactccaactagtaccatttctgttatactttttctcttatcaaataaaaaaagtagcattagtattcctattgaagaataaaataacgctgatttaatcatccctatatctatatttgggtcaataaatgatatcatatactttctaagtaatatgataaacaaaacaaatatataaagatattttctaatcataatatttctatcatcatttaaagtcttcattttactttctcccttttagcttcgtaaagtattacttgcaaatattttacaacacttccatatcttatttacacctgttaagtgtttgctttctaagaaataatttctctttttagcccaactttttccccaccaatgtatcccaaaagtgttttctgttatacattctggtgtaaagtcttctttaaatccaaaaggataaaaatattctttgtcgtaaacacgtattccttcttcataattatttgggtcaatcttcttataattcttttccataagatgagtcattatttttggtattgtaaacaatgaagaagtaagtacttctttttcataatactccaataagtcttttaaaaaaggatgtcctttttctacacctattatagcaccatttatatactctctatcatcttcatacccacagattagcctattattttctaaaagaggagttatatcctttaatatttgcatatctgtatccatataaactccaccttgttcatagagtacttttattcttgtataatcagatatgaatgcccaaagttttcttttataacattcttccaaaaacttatttccttttatttctttctctatatcaaagtttttttcattccactctactatctcatattctggaagcttttctttccaagaatttatacatatattttctatatttccttttggaccaccaaaccatacataatgtatttttttaggaatcaaatgaacacctcctacatatattcttgtctatcttcttcttttaactgttctactatttttttgacatcttgagctttatcttttctacaaaccataactgcatcattcgtagatactactatcaaatcactaatacctattgttgatattaatttgtcatctgaatatataattgaatttttagtatctatagtaatattttcacctcttttgatgttaccttcatcatcagttggatatattgcacctagagaatcccaagaaccaacatcattccatccaaaatcaccaggaactactataacatcattacttctttccataataccataatctatagagattgattgtatagttgggtatatttcttttattttttccatttcttcttttgttcctaagtatttacttatatattctaatttttcatatacttttggcaagtatctcttaaaatcttctaatattttagataccttccatacgaacattccactattccatacatactttttagagtttacatattctttagcaatttcatagtttggtttttctacaaactccactacctcatatgcaacatcttctatcgtattttctctattaaaatttatgtatccatatcctgttgatggaaatgtaggagttatcccaatagttactagtttatcattattttctgctatatagatagctttttccaaaatagatttaaattctttttcatcttttatataatggtcagctggatatacacacataacaccatcaccatattttttcattatgttaaatgctgcaaagcctatagctgctgctgtatttctggcacatggctctggcaatatattactatccaaacatttatcttttactatatcctttaaagcttccaattgcttctcattggttactataaataaatcatctttttttgctagagaatctattctgtttatagtttcgtttattaaagcatcttctccacttaaatttataagctgtttaggtacttcttgtctactaagtggccagaaacgagttcctcctcctccagccattatgacattgtatactttcattatttatctccccttagctttttatatagaatccactacatttaatatataagatattaaattgttcaacttaaattctacatcttcttgattgtctgaatttgctccaaagtaaaatttaattttaggttctgtacctgaaggtcttatagctatccaagagccatcttcaagtaaaaatttaagtacatctgacttaggtaaatcatcaacaccatctttatagtctaaaattttatctacttttacatcagccacattatctattttaacacttctaaagtaaagcatcatctcttttattttttttattccatctataccttttaaagttactgactttaagtcctctttgtagtatccaaatttattatatgtatctatcaaagcttcatacaagttcataccttttgaagaatagtatgctgccatttcacatatcataagtgaagatacaacaccatctttatctctagcatgagttccaattaagtaaccatagctttcctcatatcccattataaaacttctatcattgctttcttcaaacgcttttattttttctcctataaatttaaatcctgttaaagtatttaaacaatctacattataagcctttgctatttttgcacctagttctgatgtaactatagtttttattattgtaggattgtttttaggaagtttattttcttcaactaaactctctaatatatatctaactaaaagtgaaccgacttgatttccatttaagactacatattcaccacttgaatcttttacaacgatacctactctatcacaatcagggtctgttcctattatcaaatcagtgtcattattctttgccatttcaatagctatattaaacactgacttttcttcaggattaggatactttactgttgaaaaattagaatctggtaattcttgctccttaactaccattacattttcaaaaccacattcatttaagacttttcttactggtttatttcctgtaccatgaataggtgtatatattatttttaattttttcccgtattcatctattatattttgtcttaaaacttgcttcttaacagcttttataaactcatcatctacttcattatctaatatagttattaaatttttagataaagcttcttcaaaatctatacttttaatagtgctgtaatcatcaatcttattaacttctgctattatatcatttgccatatctatacagatttgaccaccatctgagtcatatactttatatccattgtattctttaggattatgacttgctgttattactattcccatagcacactttaaatatctaacagcaaaagaaagttctggtgtaggctttaattcttcaaaaatataagcctttacaccataagcacttaaagtctttgctacttctatacaaaactccctagacatgtatctactatcatgtgctataactattcccttttgtttaccttcttctccttgagtcttcatgatataatttaaaacgcccagtgtcgcacgtctaacagtataaatattgattctattagttcccgctcctattatacctcttaaaccacctgttccaaactctaaattcttatagaatctatcttgtatttctttttcatcatcttttatgcttaatagctcattttttgtttgctcatcaaaataaggagaatttaaccacatctcataattattcttataatccatattttcatcctttctgactctaatttaaaatttcaaggtaattatcttcttctaagtagtttttgttttccttttcttaaaaattcaaaagctaagtccatctcttctaccttaaataaaactatcaatacagtatatacagaagctccacctaatactccagctccaactgatataatttctttaattgttcctgaacccataaatgcatatagattattatatatcaataaagtagctactgccatcacaccagatgctaccaaactttttagaccagtctttataattttatcccctccaaaatatccatttttctttttaagagatataaataacaatataactgtaattatattggatgtactagttgatatagcaatacctgcatgacctaatggtcttatcaatattaaattaagaactatatttattattaaagctatacttccatttatcattggcgtttttgtatctgaaagagagtaaaatgccctatataagacatctcttactccacaagccaataaacctagtgaatataatctaagcgctatagatgtaagatctgttgataacgcatcaaatttacccctttgaaataatatcctaacaagaggctctgctaatataatagctcctatagatataggaagcaccaccaatataatacaatttgaagattttacaatagtacttataaatccttctttatcatctttaccagacatttttgctagcttaggatatataactgttattatagatgtaacaaataatgccataacaaactcatttagcctatttgcatagttaagagcagacaactttccatcacccaaagtagttgccaataatctgtcaacaaatatatttaactgtccaacagctactcctaccaacataggcaatactaggtttactaattcttttatagactcatcctttaagtttatatatggcttatacttgtaggacttcttaaatgcaaatggcagttgaaataatagttgactcgccatagccaatagtgctcctgctggtagtatccatacgtttttacctgcacttagtgctattgctgctattattataatattatatgggattcctataagcccaggaattacaaaactgtcattcacctgtaaaaacgaactaaatatcttacttccacttaggaataaaactcctgaaatcattattttagtaaataatattgctgcttggaacttagcagggtcgtttctaaatcctgctgcaaatactgtaacaaattgctctgtaaataaaagcccaataatagctattactatagccattatatagcatatatttaaaacattattagtaaattttaaggcaccttcatctccgagtcttttctttgtctcaaagtacataggtatataagttgtagcaactgcagagcctatgactgctatgattaaaccaggtatatttaatgttaatacaaatacgtctgcatacatacctgtcccatagaaatttgcaagtacaagttctctaaggaaacctaatacttttgaaaacatagtggctgccataatccacaatgctgctttagctgtttttgacatcttctttctccttatctaatttaaactctaaaagtagaacttttaaaactgcttataaacattattctaattaagtaaatttaacctatgaaaagcttccttataaattaaaaactatttcgactcatatctaagtgccctaaatgtaatcaatagtaataatagtattaatactatacaagataagaatgttagattaaatatgctcttaaatagactataatcacctactgtatacccaacttcaactacatcatttatattgctatctttcaagaatttatcttgtgcacgacttaagttatcactacaaatcagtattggcatattttcttttgctgatactactcccaaagaaatatattcgtttacatcagatctgctaccaaagtctaatttagcagtatagattttctttatatctttttcatcataaaacttctttattaaatcaacatttgtacttgacttatttatttgctttattccttctatatttttcaagttagaatcaatctctgcaataaattcttttgaatcacctaatgcatatatttttttaagattcttaccttttaagaaatcaatttgttcctcaaacccttcatctttagcccatattattggcattccacttttagcggcataagaatatacagatatggcattctctaatcctgttgttgagctaagtaaaaatgcttcatcaaatcctactgttctatacatttctctagctatctttaaagatgtatcatatctgtcttttcctcttattctttctacttttattcccattttttctatattacgttcagcatctttagatactgcctttaaaccacctactatcgtaaccttctctggacctagttcttttagataatttcttgttactctaccaagatttttactcttagttacaactattggagcattttttgcatatgctaaaggtgttgcacttatactatctacaattgactcttcatttacaagaattacttctttagaatccttaaatgctcttttatttaattctgtcgaaatctctggtatactcccttctatcaattctcttttgggatttgcatctgcaaatacctctattgtgctagaaatagagattaacaaaactaacgataatatagtagaaatttttttaatcataagttctcattccttttcttttttgtattttttgacaataaaaaagctctttttaaagagctttttcattgattagtaatctaatattttaaaattatctagctccgtctcctgtcaatactactttaacagttttaaagagtatcttaaagtcaagtaatatactcctattttttatatagtaaatatcttctttaagtttttcttcaggagtgatttcgtatccaccatttacttgtgcccaacctgtaagcccaggttttatagcgagcctgttgataaatccaggtatttcctcattgaattgaacagtaaagttcggtctctctggtctagggcctattaagcccatatccccctttaatatattaaacagctgtggaatctcatcaattctagttttcctaataaactttccaaccttagttattctaggatcatctttttcagcccattgtgcgccaaatttttctgcgtctgttctcatagatcttaatttatatatatagaatcttctcccgcattttcctagtctttcttgcttataagttattggtcctttgtcctctattttaataagaattccaaatattgctattaaaggtaaacctatcacaagtcctattatagataaaactaaatccataattctttggtacaagtcgaataaaaccgttccttttactatgctatagtcaatctcacttgcaatttctttatctgcccctggatagcttttaattttaggtatttcacactcatcattagtatatccagacatagttacctccatattggaataaaaatttttttaattcttaatttcaacttatttctatcttatttttgacttatttctatattatactcaataatgagcagattatcaatacaagaaacatcattgtaaacaatttgattctttacaaaaatatatcatctcttgttatattttacattataacaggagatgatatgttttgctttaatattttttattttattttactgtatcttctattcctattccaatttgagttcccattgtttttactttttctgcagtatttaacttatccatatcgctcttattgtcaataaatgcacattcaacaagtattgctggataattgttatttcttaacacatataggtaatcttttccattatcaagtgttcttgtcttgattcctctatttttcatgttaaatttttctagtattctttttaagatatttgatgctgcagtcttagttgttccaccatttttatcttttactttgtaataaatttccacaccattaccagctccattagacgcattgtaatgtatacttgtaaataaatctggctttatagtgtttgataatgctgttctttctcctaaagccattgttttgtctgtatctctagtcataacaacatttataccttttgaacgtaaatattcagtagttgctaatgctgtattaagagtatatttcttttcttgtgctccaccatttaatccacttgttgcccctgaatcagaacccccatgacctgggtctatcactacagtttttcctgctgctgaacccgaattatctggttctgttggtgcattgtgttttgataaactagatgctatagaatttataacactatctttcatcccatcaccaatttgatatactgttcctgctgttttttctgataagtttgtgctatggtatgcagaaacataagtctttggagttataagtattggagcttttaatttagctgctaaaggtcctgctgttattgagtcaactattatgtcagattttgcaactaacattgcactcaactctttatctggatagaaagtcttaattacatttgcatttgtttcatgtctatctgctccagaaactctattttttgaagtaccattttttgctattttagatatttggtctataatttttgatgataaactttgactaccacctatgtaataagcttcttctaaaccttgtgaagataaccaattatatgtaccttgtggtacagagtctttattagctaatattataggttgttggtcttcaccagcttttgatgaaatattaagagcatcatattcaccagcatatccatttgctatgtatattttattaacatcatgatacttatctatttcttttgctataagtaaagatgtttcatgtctatcaactccaccaatacgagttacatttacatttacagcagatttaatttgagatactgccttttgtgaaactgaaccatcatcacctataattattacatcacttggatttagacgttttaattctgcttttgtactttctggtatatcatctttatttgcaagtaatattggtgcatcatatgtagatgcaagtggagtagctgtaattccatctgctgctaattctccattaactattacaaccttactagacccatctttccaaccttgtttacttatctcaacagcagtttcaaatctagtagctccagcaagtttttttactggcgcagaagtttttctcatatattcatttactgcttttgttgaatttgcatcacttattataaactcttgtgtaacatcataatccttaagatttaatcccatagactctaagtcttctttgtttaaaactttctgttcatctttaccatttatttttatgctttgaagttcccatacatttaagtattctgggtctttgttatagtttattacaccttcatatgaatctgtcttttcattgtaatttaaagtagcttcaagtggcatatcataacacataaaatttaatgttattgaatcagcatttaatttttctttaaattttacacttgcattagatttacttcctaacactacactttttctttgtaaatttatattaatatctgaattagattctgtatttgcagtagtattttcagccgctaaagctacgtttggtgccaccattgctacagacaacattcctgttgccaataattttgttgtttttttcatcatatcccccctaattttttggttctttaaatctttaaatcttttttaatacatcttaagcttgttttatattacataaattcaatattatgtaaatcttttttcattatagcacaaaaaattacaaattgtaaactttttgtaatcttttatggcatggtttttaaattttatcgaggagaaattttgattatatttgatagtttccgtatatttgaacaaatcaaagactttatcatctaaaaatattgcactaaattttaataaatatttttttcttgtacattatagacattactataacccagaataggacatacaataaagaaaatataagagaatcccaagttgtacctgcccaaggtgttataagttcatatgtagtccactctaccaaggtagttggataatcgactttgttcgtaagttttggaacattccaaaaaacatgactcaatatctcaaggcacatatatgtaaaaatagggctacttccaagtgctattattggggtaaatattttacttttatttttgatgtcacatataaaataaaatattgacagtaacataccataactgccagccattaaaagtacaaatgagctagaccataatcttttattaaatggaaaatactgattaaagataaaagcacctattagcaggattatgctcataaccagtattttaaagaattttttatattctcctatgttttcttttaaaagtacacatcccatagtgcatcccaacatacctgaagaaattgctactatactagttaaaaaaccatctggttcaaattctggcttgtacaaatgtcccttgaagaaatgtaaatccactaactgtgcaagagaaccttctagctcaaatccataaggttttgctaatatgtagtacccaactattataaatgtagctatacatagaaaagtaattattgtagcagtacttccaacatttaatttttttagtagtaaatatactaaactagtcacaaaatagactaatcccatacgttgaagtactccaagtattctcacagaatttaaatcaggatttcctaggtaatttaagaaaaatccaaataatatcaataagatacttctcttgaatatactaagtattatactcagtgtggatttattattttttagtttactatttattgatattggaattgtaacacctaaagatataacaaaaaaaggaaatgcaaaatccgcaagtgttacaccatgccatacagcatgtcttaattgaggatacattctcatccaagtcccaggattattgcagactatcatgagggctattgatagccctcttattatatctattgatttaatcctactattcgtaagtttagaatctacaacattatttgaaattttattgctattgctattgctattgctattgctattgctattgctattgctattgctattgctattgctattgctattgctattgctattgctattgctattgctattgctattgctattgctattgctattgctattgctattgctattgctattgctattgctattgctattgctattgctattgctattgctattgctattgctattgctattgctattgctattgctattgctattgctattgctattgctattgctattgctattgctatttagattatttttctttattctagttttgtcaatacttttatttatttttttgttacattcaattccaatccccatgttacctccccaaagcttattcaaatatatactaaactacatatttatctataagtctgtttgtatataaacctgtttaactatataactttagaacaattacaacacacacttcacttaaatatacatattcttaactaagaaatttctttagaaatccaatcttatctagtatatcttgtattttattgactttttgacttatagaatctatagctttttcaattgaatctactttagcctctaaattctcaacttgattaacttttttatctatagtaccattattagttatatcactattagatgaattatctataagctttcctatatatccatcattaatcaattttgtatcattagcagaagctaatatcatcaacgtatctatatctgaatttctagtattttctataactctaccatttttgtcacgaactgacaatatagtgattgtatcatggttattaaatccaccttctccaatatttctaactataacatttaccaaagtagcatagttattcacttcaccattaggcatatctactgtaagagtctttgaacaatcaccctttatattcacagttattggtttatttgttaccattctaaaagcttcatttacagtattctcttttggtttaaagtttataatatcattaggacttgctatatttatcatatcagttaattcctcaacagtttttgcttcaaacacagttttttcttgtaaactcttaatttcatcaaaagcttcttcatttccatttccacctacctgtgttatagtatttaattttttagtactaagtatatccctttgtttcgtgtttaatttattaccaaccaaaacaacaggagactcattttttgcagccaatactccaacagctaacgagtctattagttgattctcatttttactaccatccttagttacatataaattacttaaatttgtatcagtataaaacttttctataactttggcattagtctcatttctatcttttccactcactctttctgcattaggaaggctcttttctacagctcttgaaacagaatttgttcctccaattacgtatgcttttataactttctcatctcttataaatttatcaaatgcttctactccgtccttaggactagacaaaattataggcatcttattttgagctgctggtgctccaacactaacagcatcacttaatcctttttcaccatttactacagcaacttccttaatatcttttatatccttaagcttattagccaaaatcagtgaagtttcatatctatccttaccattaattctttctacattaagtccattaccttttaacttgttctctatatctttattaagtacagcagtacctcctatcaaataaatatctttagctcctagacgttttatctctttttcagtcctatcatctagcttatcactttctgtcaaaagtattggtgctcctttagcctttgcaaatggtgtagctgaaagtgcatcagctaatgaattgtcattaactaacactacattagaactagaactgtatgccttttgacttatctttacagcagtttcatatctaccattacctattaatttttcctctgtaagtgcatatgatggtattatagaaatgctacttaaagtaagcgctattgtcagtattgttaaaatagtttttggtgctttcattattattcccccttattttgtttaaaatcttactatatttatattataaaataactttacactattttacagtttaaaattattacatttttcatcaataataagaaaactatctaaaaatatagacaagcctatttttcattatttaaatgataaaaatataaaacaacaaaaaagagtgcctcatgaactaaaaagttcattttgagacacccctttttgttattttatatttataaacttctattgaatattttttaataataaaatgtatatccttactatctttccattcactattttcctaaaagagtatttagttcattaaaagcactttcatttccatttccaccaactctaataggagtttctattttcttagacttaagtacatttttttgactttcatctaacttatttccaactagaactactggtgaatcagttttagcacctaatgctcctactgctagtccatctatcaagtctccttgactctttgaaccatctttaacaacaaaagcatatttcaaatctgagctagggtagaatttatctattatcttagcattagtttcatttctattacttcctgcaagtcttgttggatttgaaagcttactttctaaatttgatgataaagtagctgtaccaccaattatataagacttagttatttttgatgaatttaaaaactcatcagcaccttgcaactcactcttttcattagtaagtattattggcatattgttatcagcagctgctgcaccaatacttattgcatctgcaagtccatttacaccatttgccactgcaacttgtgaaacagattttatactatttaacttttgagctagagatatactagtcttgtatctatcactacctgaaattctttctactgatatacccatattactaagttgagtttgtacattcttgcttaaagaattttctccacctattagataaacttttttagttcctaatctttgtaactctgccttagtttttgaatctaagttatcttttcctgttaaaagaattggagagtcgattgctgctgtaaatggtgtagctgttaaagcatccactattgcgtctccatttactaatactgcattttgtgaagaagtccatcctttttgactaactttaactgccgtttcatatctatctgctccagttaaagattctcctgaagtagcttgtccagaagatgtttttgttatagcttttataacaaagttacaaggagaaaattcactatatgtatttatatcttcaaacttattgttttgaagtatgtagctttcacctaagtttgctttagcctcatatagatagtatccatctatatcagtttcatatgctaaagttgatttttctctattaggatttgctgtgttgtctataactactactattgctcctttaccttttggtaagctgtaagaattagtaggtacatttatgtatccagaatatgatactgttccacttgcaagttttgtcattgagttgttttgaggaactccatttactactggtgcataatatacttcatattttgctcctacagagtctgtttcaaacataacagagtcaagtttttcagaatctctgctaaaatcaaatacatttgctgctgttactttatttgacattatcttactaagaccagcatattcaagttggtacatttttttatcactatctggtttcgatactgatttcattgcatagttatctgtatctgttagtagagttttatcttcataagaaatccagaagaatcctttcatagaattaaattctccccaactgctttttactaaccatgctccatttgattctggttttacatcagatgcaaagttatcttttgaataattatcatcccatcctactatcgctacagcgtgatttaatggagccctcttatttgtacagttatatgctgtttcatctttattaaaatatgtcgaataatgtgcataacctgatgtcactgaaccatattgcattatagcattttttacagtttccttatctttattaagacgaacaacatctgttacattaaattgagtaggtgcagtatccatatttgaaggtttagttgcaccttgtgcctcagatttaagattatatggtatatctttttctaacttaggacctgcccatgctgtcagatatcctatggctgttacatttgaactacctgacatatcatctaagttccatccatattttccaccagttgcccaccatcttaaatgttcttctgataagtcatacgttccatatccctttaatttaagatatgcttctaaagttgacatacctgaaaaagaccagcatgtattaagacttccttgattttttgctggtgtagtaagaccaagatccattgggttgtatgctacacttgatttatatgctgatggaagactacttctgcccttatttcgaagtgttgtaccttccatttcatgtggaaaaggtattactccattatattttgctgtgtctccatttttgacatcttctaggtattgaagataactttcagaatactctgcagtttctactccatctagagttttatggttttctgctgagacaggtattgttgacactattaaaaagcaaactgtcaacaatgccagtagctttgacaatttttttgatttgtactttctcatgtttacccccttatatgtatttaatttttattatatcagatttctaaattaaggtcatattttattttgataaaatatggattatgagtacatattaattatagaatattatagttttatttttataatattttaagatatattgatttattaatagatgtgctatactaatgtttgttagtatctttaagtatatttatattaaattagattaggaggattatatttgattttaaaaaagcatagagagacaatattatatttattttttggagcatttactactcttgtaaatatagtttcgtatttattttttactagagttattttatttaattttatggttgcaaatgctttggcatggatacttgctgttttatttgcttatgttactaataagttttttgtatttgaaagtaaaagaattgaaataaggttcgtatttaaagaatttttgtcttttgttagttttaggctactttctggtgtcgttgaaatgttaattatgtatgtaatgattgatttgctttttgtaaatgatgttattgtaaaaatatttactaatatagttgttatagttttaaattacttgtttagcaagatgataatttttaaaaaataaatagcagattactaaatagtaatctgcaaaatgaataagtttaatgtctaaattccatcatctgtaatgctagattttccccatcgtgaaacttcattatttgaggtatctatttctactgcttctatatatgatccatctttggctctttcaataaaagattgatttgatattgtaaccatactccaacctttagtactaattttttctccaacatatttcgcagatggtttttcatcaactactctataataaattttatactttgaactctctggttttgttgatatagttattcttacataatcttttaaagcaggtatacaagattctactttaggatataaaccacgtgcctttttatcttcatctttatctgtatcattagttataggttttttaccacttattgatggttcttcacttccacttatagtattaatattacctgaattttttattgttacactagaagaattattagatattttagttatttctccacgattcaaaatatatacatcttttgaatttttaagtatcgttataagccatatttctccagaatcctcattctctattttacatccattctcatcataaacatctatcccttgtatacttccttcgttaactaaagtctcattttttatattatttattactagatcattatctatgtccccaaagttttttatatctccatttggcatatctatagttattgattgtttatatataccatcaaattcaatagttatagctttatttgtttctattttaaaagaattagttatatttttatctttttctggcttaaatcttatgatgtcatttgcatctgatttttttatagcaacattaagttcatcaatagtttcaacagtatacttagtttcttcttgcatatctattacatcttctacaacattttcattacccaatccgccaatttgaataactttatctataattttagtgtttaacacatctttttgagaactatctagcttatttcctgctaaaagtattggagaaccatttttagaagctaatacacccacagctaaagaatctattaaatcatgcttactccttgtaccatcctttgttacataaatattttttatatcagtatctttgtaaaattcttctataatttttgcatttgtctcacttctactactacctgctattcttgttgcatttggtaaacttctttctacagaattagaaatagaatatgtaccacctattacatacgatttttctatatctttactatctataaaattatcagctacttcagttccattctctgaatcagaaagtattattggcatgttttcttgagcagctatagctccaacactcactgcatcagcaagacccttttctccatttactactactattttagatatagatttttccctatctagcttttcagctaattttaaagaagtatcatatctactatttccagatattctttcaaaacttatattttctgcatttaactgcttttcaatctctgaacttaatgcaattgaaccacctattaaatatacatttttcacaccaagtctttttaattctgcttttgttctactatccaatttattactttgagttaataatattggtgcatcttttgctttagcaaatggagtagctgataaagcatctgctattgaattatcatttactagcacagcgttttcagactttttccatcctgcttgacttatttttattgctgtttcccatcttccagaacctgttaatgtatcttttgtagatgcattagatgtatttccatataatgtaacagttaaaaatgtcatagttaacaaagacactatcttttttgatattttcattaattcttacctcctaattctttcataatattttatggagcatgtacatactgtattttatttatagctagctcatcaaaatgagattttactgaatgatatcctatagcataatgtccactttcaggattccattttttatatgcattcattgcacttaataacttctcctcttgactaggtaataccttccatacctctacatttggattaacttttttaaaatccttatagtcgtatggttctacataaaatcttaaatcttttattttgccttctttatataactctagtgcagcttctcctaatgccctatggtcttcatgtattccactagctttaaacggagtaacagtttttacttttgcatctggatattcttctaagtacttaagtattatttcccttgccttttctttacttaactcaccatcatgtgctctattatcttctatatgtatattactttcttttacacccattgcttcacagctatccttaaattcttcatctctatcttttgaaaattcactttctgataaagagtatttatgaacatctttaatatgataagaacatgaccctccatcatccaaaacttttcttattatagatttactaccatctgtgcataatatgacatgtgtatcacttttttcaacatgttcaattatagcacttcccatacttaaggtttcatcatcttgatgtggtgtaaaaaataaagttgcatctaccactactacatcctcctactttataaaatgttataatttacaataaatagcataattatagaaaaagattcctgtattaattaaggaatcttctccacagtataagttattaccaacctagtattttagctatcttttgtattactgtcaattcaactccattacctatttgagttacttctgcaccaagatttaattttttactaagtgcattcctttgtgagtctgttatatcagctttagctagaagtattggacctttacctgctgctagaggtcctgctgccaatgcatctactagcataccattatttccatatccatcttttgctatatatagtttatctaattttccataatatgtttctataaccttagcattagtatcgtgtcttgtttctccttcaactctttgaacttttctatctttatcaacatcagcaagttgattttcaatttgactagatacattgttagaaccaccaactataccaatctcttttccatccatcaatttgatagcgtctgctgaaagatcattccagccatttactattataggagccttaagttcagcagctttggcagctatactcatagcatcagcctcccctttcgcacctactacaaatgcatctttaaaagaccccatagcttttgctactgctacagaagtcatatgtctatcatctccagctagtctttcaacattcttagttactgattctaattgctttttagctgtatttgatactgctgattctccacctactatatatattttagctgatgggcttttcttaattatatcttttatataatctaaagttacttttggtatttcattatcggatgctaataatataggtgcttttttagattgagcaagtggtgtagctgctaatccatcaactagtttatttgaattaactataactatattgtcagtatattttgtttgttttgctatagccactgcagttgcatatctatcatctccagctatcaatttaacctttgaattaccttctaatgcagctttggcatcttttaaatctttttcattagtactttctacagtaagctctattgcttttccagatgcatcagtatacttaatagtaaatttatactttcctgtttctgaatcttttgatgaaatatcactaattgactttgatgttccatttgctaccatattacctttaacagttaatctatatccatcatataaatcttgtggtgaaactgtatttaggtcactattttttatagttatttcagctaattggacatcatcaatatttttagctcctgctacacctagtttaacgattttatttactctaaatccttctgtagaagggtctaagtttgttcccgttgaatcaactggatttgctgttaaatcaattttttcatcaccaatacctatctctatagttttagaagttactgtgtctgttttatctcttaaagttataactaacttatctttagcactatcatatgaagcttttacatctgcaactttataaattccattagtttcagttttagctttttctgttatagaattagcctcagcggaaaggtctgctgaattttcatatttttcagttgcttctgcaactacttcatttgcactatttgttatatgccctttatctgttatagttacaataagttctttattttctcccaaagcatttactaatttctctaattcatctatattagttattatttttaattttgataaagtctcgccaacttttatttcatatattggttgtccaacttgagaaccaccagtatacttttgagacattaaatctctaactttcgaaactagttctgtagcttctttcttagttattgtttctttttttacctgtgtagtttctgcagcaaaaactggagctactgatgtacttatcattgcagcagccataattacagaaagattttttttattcatggtattttccccctaaaaaattcaaatttttattattttttccttatttaccaattataatatatatttgatattatttcaataaatgagacttattgtaataattaaccaaaagatataaactttttcttatattttatttttttaatatttatgtatacaaaaaagtaacaaaattgtaattttttttaataatccagtttataactaatagacttttcatcttctttatagtataatattaaatggaagaaagaaatttcaagcatctcttttttccgtatttctcacacagaaaaagaagctgattttcagcttctttttcatttgtattccttaattatttaattgtaattacaatataaagaatcaaaatattttatttttcatttaataaaaattacatgaacttttttagttaaatttatataagtattgtactgttgcttcccttatatttttatttaaagcttcaaacatatcatatccttctaaagcatattctttaaacggatctttttgagcataagatttaagacctatatactgtcttaactgttccatagcatctatatgatctatccagtattgatcaaccacttttaaaagtactgttttttctaactccgcaactttatcaataccaatcatcatctttttcaagtcataaaccctttttgaaatttcatatgtgctatcaattatctcttggacactttttttatctacaccgggtattagtaatgtatctgcaggcataaatgtactatataaatgtttaaaatatccataataatctctttttcttccaattaaataagtttctcctgcttcttgtatgatgtctttaaccattttttgaatatcttcttttatatcttcatcatttaacactttatttctttcattatatataacctttctttgctcattaatagtatcatcatatttaagaacattttttcttatttcaaaattcttaccttctacacctttttgtgctctttctatagcccttgtaagtgctttactttcaatagccgtattttcctttgaacttgttctcttcataagtttctctatagtttttccaccataaagctttattacatcatcttcaagacttacaaaaaatcttgatgtacctgggtctccttgacgaccagaacgccctctaagctgattgtcaattcttcttgattcgtgtctttctgttcctataacataaagaccacctaaatttttaactttttcttcttcttctttatctcctgcacctagagaaatatccgtacctctacctgccatatttgtagcaatcgttatagcatctaatttaccagctttagaaattacctctgcctctttatcatgttgtttagcatttaagacttgatgcttaataccttgcttcttaagcattttagataacttctcagatttttcaacagaaactgttcccacgagtattggctgtctagtcttatgtatccttattatttcttctacaacagcactatacttttcttcttctgttttaaataccttatcatgcaaatcagctctaataactggtctattagttggtatttggacaacatttaatttatagattgactcaaattccccttcttctgtctttgcagtaccagtcataccagaaagtttttcatatagtctgaagaaattttgataagtcacagtagccatagttttagattcattctttatctcaacaccttctttggcttctatagcttggtgaagtccatctgtatatcttctaccatccattactcttcctgtaaattcgtcaactatcattacttctccatttgagataacatagtcaacatctttttccataagcttatgacctcttaaagcttgatttatatgatgatataattctatattctttatatcagtaaggtttgttataccaaaaaatgactcagctttgcttataccacttgctgttaatgctatagttttatcttttctatccatctcaaagtcttcttctttaacagtttttacaaagttatttgctaactcataaagttttaaatcttcatcaccatctcctgcaataataagtggagttctagcttcatctattaatattgagtctatctcatctactatggcaaagtttagttccctttgtactttatgagacaaatctggcaccatattatctcttaaatagtcaaatccaaattcactatttgttccataagttatatcacatttatattgttcttttcttatacttgggtcttggttagataaaattacacctacagtcaatcctaaaaattcatatactggacgcataagttctttatcacgttctgccaaataatcatttactgtaattacatgtacaccttttcctgttaaagcatttagatatactggagctacctcaactaaagttttcccctcaccagtcttcatctcagctatctttccttgatgaattactatacctccaattaactgaactttatattgacgcattcctaaaactctttttgagacctctctaacaacagcaaatgcttctggaagtatatcatccaaactttcacctttgtctaatctaagtctaaaagtatttgtcatttcttttaattgttcattctctttgatttccatatctttttctaaagattctattttatctactattaaatttaattttttaatttcttgttcatccgctttatctaagattgcatctaaaactgacatattttttgacctcctcttttatcatacaattattattataccttaaaattatagaatagtagacaattattttattgtatagtataataatcatacttaaataaattacatctttatatatttaagtatttctcacataaaaaagagactaaatttagtctctttttttgtattcgaaaacataatataaaaagacttctcatataagaagcctttttatattattatatttatattacatacttaataaatcttttaatttatttataactgaagtagctatacctttaccaacttgaactaagttttctccattatctttatcaagaactttacttatagatacactttgatctgaagataaagaatcagtagctaatactataggtgctggagatactaatttatttttatcattatcagaaccagttaatactttaccatctttatctactggcttaccatcagaattaagagttacaccaaagtttgctgcaactggagctgctgctaaagcatcaactaattgatcttctttagtagaaccatctttagctacaaagaaattaactacttttttatcattatttaagttatcttgataataagaagattcttttataacttttgcattagttgcttgtctatcatctccactatatctatctggagatttacctgtagcatcatctattgcattttcaacatctttagatacactgttttctccacctattatatcaacttgtgaatcatctaagaaatcttttacatcatcatttatagttttagcttttccatctacaactactattggtgtagcatcaccatcagctaaatccattttaccattagcatttcttaattgagatgcaactggagctatactcatggcatctgctaatcctgttcctccaactacaaatgctttatcattatcaagacctacttcatcagctatttttagagaagtttcatatctatcatctcctgctaatcttgtaactttaagtcccatatcttttaattcattttctacttctttagatatagaattaactccaccagctaaataaactttctttgaagtatttatacctgttgtactctttatattcataactctctttatttcagcttttacgcttgaatctaatttatcttttgaagttaataataaaggagctttcttttcagaagctaaaggagaagctacaagtccatcaactattgcatttcctccaaccaatactacattatcaactgaatctctaaatatagcattttcatcatcagagttataatatttttgacttaatgctattgcagtttctattctatcttctcctgctacttctatagcatttgaatatccattattatatgttcttaaatcatccacataatcttttaagtctttcttcttatctgacttaagagttaatttaactggtgaattttcatcagcaattgaagcctttgcagcactcttagttgtaactctttttccttctggataaagaaccacttgatattttccactaacttcttctactaatctattagtatctgcttcatccccatttaatactctgtaaagagtatttaaatctgttttattaaatacatattttttagctaaatcttgtgctgttttactagaactagcatcaatatctattgtctcttcttttgcattcaatattctaagtttagttattactgggcttccagattgtgttgttggtttagcaaactcaatagtcgcagcttgatcatttgcacttgcaggtgttattattaattctttggctaaatttatagtatcactatctcctaatttaacaattttttctgtttttccatctgcaaattgaagacctgttgaataagtagttccatcaactaaaccaaactttttagttttcatagcatcttttatagtaagtttcacagcagtttcagttgaatctgtaaaagctgtatcaaatacatctgacatagacataactgcagcactacttggagctgtattttttgctcccggagtaccagcattttcgacttcaccaataatactacttgtagctacttttattgcactagttccacctgttaaattttttaatgcaacaagtttacttgtagttactttatctccctctgctggagagcttattaagaaatctacataatccccatcacctaaattgtctaatttattatctacttgtgtaaacaataatttacttgcatcttctgcactaagctcagctcctacttttatagtagatgctaaagttccctcaaagaaaattttaatctctgttatacttccatctaataaccctttttgtaattgttcaactgctttcttatacttgctctgtactactgtatatccttgatcaccagtctcaactttcgacatatcttctgctgcaaacacaggtgctgcagaagctaatactgttaatcctgacatagctattgctatattcttcttattcatttcttaaattcctcccaacattatattaaaattacatctcttcattatgtacatagaataatcatccatatattcctaatatttctcacatctctataataatccatttttattctttttgcaagtcatttttttgaaattattatttttcccaagcatatgagtttttatacccttaaactccaatatttaataacttaaaaaatttgattttacttatttaaattacttatttaaaaattcttgtgtagcatacacttctccattaggcaatatatataatccaaacccagtatatacaaaatcactatttaacatattttcattatatttatctgactttttccaaactgtaaatattacatttgctacttctctagcatcctttgttgtataagtactttttgtaacaagtggtacaaaagctatattttcttcacttctcaagccatatccagtaaatacttcaacagatttcttaccatttattacatgtgaaaactgacctttatctgccatgtacttagaccaggaattagaaagtccttctaagtttttagaaacttgtaatggctctttacctttttcttttctatatgaatttaccaaactatacatttcactagaaaccattcttttaaactcactactattcatatcattagtcttatattcaagtacatttacttctacacttattgatgtagtctttccaccaatatcagtagcttttatagtaactttgtatttacccaccttatcagtatcaatatttcctataagctctggtgtcaaatcgttaccattgctatcctttgctacgatattcagtttacttatatcaaacttatcaccttgataaatatttaaatttccaacagttattgttggtgcacttgcatccagtgatgatgcacttaaacattgttctagtgtcttttcatctattcctcctagtgctgtaatcttatcagcacttctaagtacagacttatcactatttccgtcaactaatacaataggtgcattttttgctatagaagaaccagcaactgcatctactaattgataacctttagaaagataaaattcttttgccgaactataaaaatgttttataacttttttattagtctcaaatctatcttctccagctaatctaactgcattagtttttttaactaaatcattacttattatctcctctgaaccaagagcataacattgcacaccttcttttttctcaaatggaacatttttaccattagttaaaattataggtgatccatctcttgatgctactgatgacgcactcatagcatctgcttcacctgtataaccattagttataaaaaccttatctataggttttattgaagctatttcttttgctataagataacttgtttcaattctatcattaccacctattcttttaacttctattcctttttgctttaattcattttcaactgattttcctattgaatcttcagttcctattatataaaccttctttacatcttttaacattttttctgtgtctgatggtatactgtttctttgtgataataatataggtgctttaactgttcctgctaatccacttgcacttaatccatcagctagtgtattatctgtatttactaatactacattttcatatgtttgtttctgtgcaattttggcagctgtctcatatctatctttcccttgtatcttttctatgctcgaaagtgcattgatatttggtgctcctgccattattaatgatattgtcaatcctattgataatactctcttatttaccttcatcgaactcctcctactaatttttttatataattcagctaatcataaattacatcctcagtagtgattccctcaaaatctataaactactaaaacaaaaaacacctaaaataccatagcctgtaaagcaataacaaaacagattacaaaaagtactttagatgtgattttcattttataatatcagtaaattaacaaaaaaacaagatttatggaattttttacaaactaccttcattgccatttaaaaactcctgagtagcatgcacttgaccatcagataatatataaagcccaaatccagtactatagaactcatcactaagcatgtttgcattgtactctggagacttcttccacacttcaaatatagcctttgccaagttttttgcatcttgtgtcgtttgaacgttcttagaatctatataaatatatgctatattttcctcacttctcattccaaactcagaaaatacttgtggagcattttttccatctatataatgtgcaaatacttttttatccatcatatacttagaccatgcatttgccataccttctagcctactagatactaccaaaggctctttgcctttttcttttctataggaattgattaagttatacatttcagtagataccatttttttaaattctgggctgttgtaatcataggatttatcatccaacacttttatttctactctttttcctgtactttttccccattcgtctgtagcttttaatgtcaatatgtatgtacctactctatttgtatctataaacccatcaacttctattggtaataccttcccagtgttatctttagccactatgtttaacttgccagtgtcaaacttttcacccttatatatctctgtacttccaactgtaattgttggtggttgtccatttgactttgaagcatttatacactgttgtattaccttctcatttatttcacctacagaagttatattcttagctccttctaatacagttttatcgcttccatcatttactagtaccattggagagtttttagtaagtggtgcagctgctattgcatctactaattggtatccatctgatacatagaatccatctgcactattaaaaaagtagtctattacatttttgttagtttcaaatcggtcagttccttctattcttactgagtttgtatttttaactagagggttactcattatctcctctgaacctatacaatatgattgaatattttttacatcaaaaggcacactctttccatctgtaagtatgattggagctccatctctagtagctactgatgatacactcattgcgtctgcttctccactatatgcgttagttaatagtactttatccactttttttatagttgctatttctttagctattaaatagcttgtttttagtctatcttctccaccaattcttttgacttctatatttttagaatctagttctttttctactgatttacttatagtatcttctgtacctattatatatgcttttttgatattttttagacatctatttgtgtctgctggtatcttattttgttgtgtaaatagtattggagcttttgtagctcccgataatccacttgcacttaatccatctgcaagtgatttttctgtatttactaaaattactgtttcataagtctgtctatcagctatctttgctgctgtttcatatctatctttaccgtatattttttctactactgatgatgcatttacacttttgaagtttactaagattaatgatactgctagacctaatgataatatttttttgttcattttcatatccccctgatgatttttatattttatatttatattgtgattattttctatttattttctctttattttccatatattatagagtatatatgatatgaatatatctcgtctatatattagtgttttattttattaaatttaaaaaattatttttaacttctttttaaacatattcaaaattgaatttatatttatatatataaaagatatctgctttatttaaaattaaacttaatatagctcaaattattatacattttaacctcaatattattaaattgttaagataatgaaaataaaataagaatgcatctaaatatataactttatatctaaatacattcttattttcgatttacttaatatttatttttcaattaaactcttaatcttatctactacagatgaggctattcctccacctacttcaaacaactttgatgaatttttaccttttaatgatgattcttgtgatttatctaacgtatttgtagcaagtataactggtgaattgtttttagctgctaatggtccaactgctaaagcatctataagtttatcttgatttgcaactacaactccatctagtttagattgagagtagaatttatctattactttggcattcgtctcttgtctagtttgacctgccaccctattgtttgatatatctttgtttgctatttttccaacttgttcaatagccttgttagatattttttctattccaccaataaagtatatatttgacaccttatttgatttaataaattgtacagcttcattatctacaccatctttttgtgtaagtactattggagttttttctttaccggccagtgatgctattgataatgaatctgcttctccatttcctgcccctatatacaatttgcttacattattcgtcttatctatttcttttgctatattaatagaagtttgatatcttgtatctccacctattctctgtactgatatttttgaatttacagctttgatagcttcaacaactgaatttggcattgagttgtttccacctatcacaattacttttgatggatttagccttttcaattcttctacagttttttgaggaagcttttcatttgatgataaaagaatcggtgagttttttacactagcaagtggtgtagctgtaagcccatccaccatgcttttatcttctccatttactattacaactgtatctgattttgtccaaccactttgagatattttggtagctgtctcaaatctatcagcaccttttaattttttgactgtgacattagatgtagaattacttgaacttcctcctccagaacttccaccactagacgagccgcctgaattacttccaccaccattatttccaccattgccattatctggtggtaattcatccggttttgataattcattttcaactatgtattctaaactttttggaagtgtaacttcaacatatttatttattgtagcttttcttcccttagttattttttgtgctaatccaagttttaatattacatttgaaccactttcttgtgtttctttactaacaatagaatagtttatcctaatattgtttaataaatattcaagtgcttcacttttctctaccttatacttctcagggtcatttttactagaaccagttccaccaattggttttacttcactctcattaataagggtaaatattaatccttcatcagagtttatattttcataatccactgttttgttgttatatgttacaatttttaaagctggtttatcgcttgttccttttcctaaaactttatagtcagcatttgagttactgccagatttttttacagatattcttcctatattcaatctatttccgtctagtaaatcttcatttgatgtaacatatatatctaatgtagttgtattacttgatttgttgtattctactctacaagtagcatttgcatttccactttttatctgagattttatattatcagaccaagtaatcttttctttctgctcattatctactacttcaacctcaccttgtacttttatactggcttgaaatgaatatactatgttttctactgagtccacagatatatctatagtatttactttctcatacgtttttgttccttgtaaaactggagctgcatatgcacatgtaacactaccagttacagctactgccatagttgatactgctatagttcttataaaagattttcttttactcattaacacccgtccttatctatcattaactaagtggataaatttacttatccacctagcttttatatttaatttataaattaccctaaacttatagttacatttatatactttgcttttaatatctactattttaaaactattctagtacctaatcatattagatatacaatgttagtattagtatttttacgtttttagagttccacctactatttatctctaacaatattaccctttactttattgcttacagttataaccttcttattactgacatcaatagcatttcttgtagcttttctagctttactattactatcagtaagacttattgtctttaactcatcataattcttagctcctacaggtacatacattgtatcacttacaaatctttgacctactggcgtatctccttgaaggtcattgtatctatatagttcagccttaaccttatcacttaaagaatcaaagttttcttttggcatatagtaaacccatgtacctttactgatttcacctaattcacctttttctggaacttctgcaaataaaagtgcttctccagatatagtcttattgtttttatctataagtagtggtaaattaaatgctggatttccactgtattcacctgtaataattattgaacctgctggaatcttacctgtttcatcttcacttgtgctagggtcatcactttgatatacataatcttctgctaactttccaattccattagtacgagtttggtctgcattattcattgtgccaatttctatattatcacctggaggtcctattatatctaattctgcaacttctatattagacttattgtttgagattagttttacatatctagcttggtatgtccaaagtttatcatctttattaaatgtaactctagcttcattatcttggtcttttcctccaccaactaaatcttgtccatattcaaaagttccttgacttacatcttcccagttctttttatcattacttacttgtatcttgtaattagttaaaggattgtatgttgtgctagtattctttctaaagttaaataatccttttaatgagaacttcctagtttctgcctctggttttgtatattttagtcctactataggtaatgtttctttcatgtctactattatatatggattttcttctacatttatatcagggtctttttgagggtctttgttccactctgctttacttattatctttcctttatatgtagtacttacatcattatcttttatattatcaatttcaggattttgtaatggtccatgtgagtcattttcagttctaacatcaccgtcagaaacagtatttgttatgaatgaccatgctgatttatttattttcccttcatctgataattttacagtgccaacttcaaattcttctgttggatttaggtgataatcatatgcaactaccttatatgtaaatgctctgttattaagaggagatatactatcagtaaatttggccttactatttccttttgcatccacaaatccaactgttctgtattttacctgtgttccattttcaccatctaaataatttccatcacttcttattatttcgtatcctagtatcttatctttatccttatctacatctaggtctatagatattttattagatttaactagagaaccactttgtattccatcagaaaaactagcacttactttagtatcttttgccatactagctatattttcatttaaaatctttcttctagcttcgtcatttacatattgtatctttcttgattctttttcatagttcttactatccattatactgtttaattctggtgtaatttctactccccatgccttaaagtaatctcttaaatctttttcaacaacacttgatgccattgctactagcatttggtcttttggtaaactattaattgggtcactacttgaaagtgctctgtattttcttgaaatctttgcatagaatgtatcattacttaaatcagcatctgagttattctttaacattgaacccgtaaaatcatcatcataagctagatgtaattgccataacattccaagcctttcaaatacattgcttggtatacctaagctatttgaagttacatgctcatatatcttatccattgttgaaccttcaagtcttgaatgtgtcttatcatcaaaggtctgagcaagtaaagcaagtacattgttactagtttcgctatatgtcatctttccaatatctgtaacatgtcctatttcatgacctattccccatccaaataagtttcctcctgtagcttttccactatcatctatttggaaaggtactccattcataagccctggaactgaaccatattctactcctacatgtaatccagaagcatacataaatgctccaataaacattctttggtattttatgttcatacgagattttggagccatatcatttttagttaagttaaattcattatcatctacagttccattaccatctaaatcttgtgttttaaatactcctctttctgagtaaactaaatccattatttgttcccatgcaagcatactattatataatctatctacttgtgtatttaaatcagcatttccttttgatattccttgatatacagctgttgcaggaacatttaatgttactttatcactttcaatatctgtagtgtttaacacaccagttttttctgaatattcatatgaattaccaatatttgttcctggataatatggttctccttttacagcatctttatatttagctaattcttctatatatgcttttatctttttcttagattcagaaactcccgcaggactcttatcatttattgttccatttagattaagatgtggtatcttagtagctcctgctacacgtacttttatatctcctccacttggagtatcttcagggtatcttatgtataaacttcctccacattctatatctaaactatgaagtttgcttaattgaattacattttttccagttttaagatttatttctccactcttatatgcaccagattctccatagtactgtgtatatatcaacttaggagtttttccacttttacttccaacatatactgttatttcatctcctgctctagcagctactcctaatgcctgccagtcattttgcatgcctaagttattggaatttacagtatactgtccgtttttatctttatattttcctgatttatttatttcttgatttacagtagttacatcagtaagtgtggctctatcattatataagtcttgagctaattttaattctctatcaataactgtcttatatggatgatattctccactagctttatctggagtatttaatctatcttttaattcagttattttttcttgagttacatcttcttttaattcaacttgtaggtcatccataaatagatttcttacatcatcttctatactgtcatactcataaaacttaagttctgatatattagacttatatgaataagatgaacaaacacttacttgtatcttagtagcagttattggttcttttaatctaaccattacatacttattattatttacagggtctgtctttgtttcaaaaggaacatcccccagattgtgtaattgaccattttcatcccaatatcgtatctcaaagtcatttattgtcttatcagaaacatcaaaacgaggtgtagccataaaagtatccatagtataagatttatcaaaagttattattggtcctctattcgttccctcagctgcattatatgttgggaatgtccaatgtgttgtgaagtctccatctactacattgaatttatcaaatggatttttatcactatattcacttttgtcatatcctgctggataaacaacatctacaatgtgatttgttggtattccaaatccaccattctccttaggagtattaattaatctatagttaggtgttgttggtgcatctatgctttcagttgtacctatatatgttttagacattccactagttcccaagtggttagtagctgtcattctaacttcatatgttgtgttatccttaagaccttctatttttaaacttgtcccacgaataagcttatcattgtattttatccaagacccattagagcctttttctttatagtacaagtcaaagtctttagcttgtttatgatttttccagcttacatcaagagatttaaatttacctttaacatttataccttctggtggttctggttttgtgtctggaacaacttgaaattctaatatgctatctgggctaaattgtataggtttatagtttgagtctacattttctggtactccatctaagttttctggcgttgcatctttataaccactagaccaatctccatttaaagattgtatgctaaccctatatagtccatatgcttctatatctctaacttctattgtatttttactagtttgtaattttttagtagataatacttttcccttactatcaattttatctagtataagttcgtatgctgatacatttacttcattattccaataaaaagatactttttcatttccaacagcagtgctagtcgatattttatttattttaggtatgttcatctctggctttggtatttctttatatacattgtttaaaaattcaacttttgatatttctgcaagatttctatcgtttgctgttgtagctgttatttttatagttatcttttttactgctacttgtttaccaagatttattactatatcgctattttgaacatctgtatatgtttctaatgctgccctactatatgtagatgttgtagagttatcatctttactgatattatccccttcttttggagtatcttcatctgaattaggtttatccattgatgaattttctttatcattatttttatcttgattggtattagagtttacttcttgtttatcgctattttcctgttgtttatcattattttcatctttattatttgaattattatcagtctgatttttattttcatctttattatttacttcttcttgatttacttcttcttgttcgttatttacttcctcttgttgctccttatcttttaagtttttcatatattctttattttcataaggaatctgttgaacattaccatcttcgtcagtaacctcaactattccttttgctggagcagtaccttctggagcttttatattgatgacttccatattaagtgcttctgataaagctatatccattactgctggtttttcctcagatatttcatcattttttgaagatattgtaactccattattttctccactaaataaattttctacattaccattaatatctacatcactatttccttttaattcaaccttacttgtatctactataggattggtagatactatactttctaggctttttgcatcttcactttgtcctaaatttttctgtacataatctaagtcaacaatatctacctttccatctctatttaaatcaaattctcttttatttgaatctatattctctaaaaccttattataatcactcttatctactttaccgtctccatttacatcacccattaagaataattcataatttaaaggtttatttttattatctacacttgctctattgcttaataagactctttgtgaataacttgatatatcaatgtctttaatttctttgttcttaaatccagctccagagacttctatattgtattttccaacaggtaaattattaaatacaatattataatatgatacattctcatctttattttttatttcacttctacttgcagataatttttttatagtatattctatattatctgtcccaatatttactgttcctgaatctttttctccaagctttattattccactattgttactatcatcttttaatcgtaactgcatattagtcatactttctgactcgctattttttattggcagtgaaaaatttaaatctacttcaagattcccccttaacttttctgtaactgatttttcaactgcccttagcttcccctctaatataggttctgcaaaaacatttagtggtgcactacacatagatactgctagtacacaagatattgcctttttcatgaaacaacaatcctcccttaataaatctctaatttttcatgaatttaaatactataagtttcagacaataaaaaaagacactcaaagagaatcttaattataaaataaaaagactttactctttttagcaactggctgatatggctttaaaagctttaatccctatagttttgcgtcattagatttccctaattttgccatttaattttcactactttcttacccattttatactatatttaaactttttaatacaatttttttacattaaattataaaaaaataacatttatattaataaattaatataaatgttattttccattataatttaattatttatatagcttccttacaagcataattttgtgtatattttcttattctttatatcttccataaaattcatgtgtagcatatagattcttatctcctgttatagctataccaaatcccattatttcataccctttatgcaacatattagttccttcttctggatttgtcttccactcattaaaaataaagtttcctatatcatctgcatctctatttgtatatacaggtttatctgaaattttatatttaattatattttcaccttgaactgctatatatccaggtttaatctcactccaatctaagtatttcaaaaaagtagaatatgaattttttccatttatcgtatgagataaagtcttcttatttgccattaaattagaccaatcatttgctagaccctctaatctgcttgctacagataacgctcttactccattatcttttctatactgctttgtaagagcatatactttaccctttattctctctttaaatgctctatcatttggattgtaatataacccttgttgatttggtgaagcttgatttatacattgcttgataacattctgatttatgcctcctagtacagtcaatttgtctgcaccacttaaaatactcttgttactgccattttcaactaaaactacaggagcattttttgctattgtagaggcgaccaaagcgtctgttaattgcaagcctttacttagataaaattctttactatttttataaaactcttgtataactatcttattagtttcaaatctatctgtgccacccaatctaatagaatttgtgctcttaactaattcgtcgctgattatttcactagaaccaagcgcataactctttaagcctgtcgtgtcaaatcccacactatttccatctataagtattataggtactccatctctagcagctactggtgatgcacttatcgcatctgcttctcctgtaaatccattggctataattactttatctattggcttaatttctttgattttttcagctatttttatacttgtatcaaatctattttcaccaaatattctttgtacaaccttctttttggataataactgattctcaacatttttacttattgttgattctgagcctattatatacacagtctttgctttgtttaatctttccatagttgtgtttggaatctgattttgctttgtcattaaaataggcgcatttaaggctccagctaaaccacttgcacttagaccatctgctaagctattatctgagttgattagtattgctgtattgtagttttgcttatctgctatttttgctgctgtctcatatctgtcattcccttttatttgctcaactgatgtcaacgcatttaccataggagtatttaccattactaaaaatagtgtaagtcctatagctaatatctttttactattcttcatattattttctacccccaatgtacttttcatattttttattagtactcatacttatttttaatcaaaagttacaattttgttaccatattttatatatgataccatagttatccatacaactcaaacaatatacctaaagtttttattctctataaattcaaaacattataatttattttatttaattaagttataagttcaaaataatttatgttagtaatatgtttaatcattataagaagtatctttttataataatttttgcaatatgaatttctccacattataatcaaaaaataaaataaggtatctcaatctaattctaaatgagacaccttatttttattattttatcttgttatttgtatattttataatatctacactatgtcttacatattaacgcattgtataatcatatattatctaaataaacttttaatattaattcctatatcttattagttcttagtaaataagtttattttttctgctattttttcaatagcgtttttagctattccttcacctatttgtactaacttagtagcattcttaagtcttaactcaactacttcttcttgtgatttagaaagttcttctgtagttaatactattggagcctttgaactagctgcaagtggtgctgctgtaagtgcatcaactaattgtccatttccacctacataaccatcttttgctacatatgctttagttgcacctgcatagtatttattgattactttagcattagtatcttttctattttctccagctaatctttcaactttattatttaaatctatatcaactaatttgtcttcaacttcttttgatacagaattttctccacccactatttctaattcttttccttttaataatttttcagcatttgcatctaattcgttacctgtaactattattggagcaccaaattgagcagctctagctgatatactcatagcatcagcttctccatttccacctactacaaaagcagtcttaaatgtatcttttaattgttttgctatttctaaagaagtttcaaatctatcttctccagaaactctctcaactttacttacacctaatttagaaagtttttcttcagtttcttttgatactttagattctccacctactatatatattttcttagaagatagattacttccaagtactcttaatatttcagcttctatttctgatggtagtgaatcttttttagataataatattggtgcatttttttgagaggcaagtggtgctgatgctaatccatcaactatagcatcttctccaactaaaattatagcttctgcttctccatctttgaatctctctttactaacttctactgctgttgtaaatcttgaatcaccagataaaacctctacttttaattcttttccatcttttacatcagttaatactttgtgtaagtctctaactaacttatggtttttacttgaaacacttattgtttctgacttttcatttgccttgcttaaaactatatcaaagcttgatttttctggtttatctttatcatcactatcttcttgttcttgagtaaggattgcttcattttcaaatgttaaagcatatccatttttaactttattaactatttctcttcctaatgtagttaatctaattccatcaaataattcttctgctgatatgtcttgtaaatctgcgtttttaactgttatcgtatgtaattcttttgaatctatgtcactataactcttttcataaccttcaaaagtaccttcttctgatgttatcacttttgagaaatctaaatgttggtctcctacatttaatgtaataacatttgctgaatcttttgctctttttacttcaactgtatttgtagattttatagttgctgttaacttgttatcagaatcttctgctaaagttgcattgtaagcattaactgcatctactatttcttgagcagttttgtagttttcaattttatagtcaactacttttccacctaacacttgatgtcctttatcttgaatagtaacttttaaactttgcccttctgttaaagagtttattttattttgtaattgagttgcattagttaagtttacattgtctacttttatatcgtaaactctatcatttacatttgctcctgcttttgtatcttcaaacttaacttctaatgcttttctaacctcttcgattagtttagcagaatctttcgcacttactgtgtaatttttatcaacattttctgtcacagtattgtctgcgaatattggtgctgctgcactcataactgtagcacctgccattactattgccatacttctctttttgttgcttaacatatttatgtcctccgaatattattttttattttttatattcgtatttcccacacataaataatattatatataatattatttttcaatatattttatgtgtttacataatttactaacacaaacactaataatatcttcttgaaccccttccccctacttagctctctataattatgctcaaagatagaaatccctattttatagtgattttctactaaacaatcatatactaacaaaagtattcaaactccatttttatatactactatgcactaatttttgctttgctcttattacttaaatatatatcactaaattaatatctacctccatatattaaaatatataacatattataaaatcatcataaattagagtttaaaattaaaaattattctaatacatgtaattgataaaaaataaaatataagagtagctactttaaaataaatgctcttatatgattagatatttttgcataattaaacgataagaaatcaaatttaattttacataagtagaatatatatttttatataataattgaaaataaaagaggatacctcataatgataaaagaatcactttgagataccctcttacaaacaactaaatcaataattttctatctttcacactcttgatttgcaactgtacaagaagttttacaagctgattgacaagaagtttgacactctccacatccaccttttgcagcactttgctttaaagtagcttgagataaagtttttacatgtttattttccattttcaacgcctccatttctaattgtttcctattgattatatcataaaactactttaatataaactctatttaaagttgacacccaatacgcctccaatgcctcctgctgctgatattagcaataacttataaatcatccctacttcaaatacaaacttttcttgtgctaaaaacacagtcaaaaaaatacatactatgtacaaaagtcctactaaaagtccatacataagtcctttttctttcatgtgttttgaagtgtaaaaccctcctatagctgcagaaatagtagttataaatgatgagaccatagttatattatctccaccaatatctgtaaatgtcaaaaataagttatacactaataaaacagccaaagttattatatatgcatatcctagacctttaaaaatataattagattttcccataaaaaaacctcctctcaaattaatatatattcgagaaaaggcttttaaattactaatttagtcttcttctatttcttcttttttagatttaacagttcctatagcccatttttcaaatggaactttagttctatttggtcctaattctaatattacaacatcatcttcaactttagctacattagctactattccacctattgtaatgaccttgtctcctacacttaggctacttctcatttcttttaattgtttgtcttttttcttttgaggtctaatcattaggaaataaaagattgcgattactactacccatagacctatactcataattatttgttgctgtggcattaatttttcactcctttgtaaattatactcttttgtaaatcataataaatgtttatataacaatttactttctctatctttgagtactattgaatattatatattaaaatgattataattaatagtgcaaaacctatatttcatatccatattttgcaaaaaattcatttctaaaatcaagtaatctatcttccattatcgcttgtcttatttgtttcattaaatttaataaaaagtgaagattatgagtagttattaatcttgcacccagtatttcatttgcttttataaggtgtcttatataagctcttgaatagtttttacaagcataacaatcacattcagggtcaagtggagtaaagtcttcagcataagttgcatttctaactactactttaccttggctagtcattgcagttccatttctagcgatacgagtaggtaggacacaatcaaacatgtctactcctcttataacaccttccactaagtcatctggactaccaactcccattaggtatcttggtttatcctgtggcataagtggagttgtatgctctagcacgtcatacataagtggttttggttctccaacactaagcccaccaatagcatatcctggtaaatcaatactagttatttcttttgctgattgttctcttaagtctttatacatcccaccttgtattataccaaataaagcttgtttgtcggtattattatgggcatctttacatctttttaaccatcttgttgttctttctaaagaattttttacatattctctatctgatgggtatggtgcacactcatcaaacgccatcattatgtctgaacccaatgcattttgtatttccatagctttttctggagttagaaaatgttttgaaccatctaagtgtgacctaaattctacaccttcttcttttatctttcttaaaggccctaagctaaatacttggaaccctccactatctgtaagtattggtttatcccagttcataaacttatgaagaccaccagctctttttataagttcatgacctggtctcatatataaatggtatgtgttactaagtattatttgtgaaccaatctcttttaattcttctggtgtcatagattttacagttgcttgagttccaactggcatgaatattggtgtttcaataatcccatgtggagtgtgtaatcttcctaaccttgcaccactctgcttacaagtctttatcaattcatatcttactgcgtacataaagttctccttaaccatatttatttctcattatttcttaagatatatttgtaataagctattcatataatttattgtctaaatagatttatcttcgtcttctttgttctgttgctccttaattgcttcttcatcatgaatactcattatattaagagcactcttgtcttttgttactaaaaacttttttatagcaaatagtcctgctatagctataactcctattaaaacatctatcataccttcatttttaggcagtagcaacatttttctagctattgcgtaaagtaatgcctcaataaatgctcctggtatatgaagagatagcattactacaagttcaacacctattactaaaagtaatatttgtgctaaaaaatcattaagctgactgtattgtactggattttgaaaatcaactatatatgctccccacataagtcttagaacatctatagttcctaaaaatactgctattagaactactactgctaaaacacgttcaaatataaaagcaatctttaatatagggttattctttttttgtttttgtaaactatgcattcattacctccctactttataatcatagcatctccaaaactgaagaatctatatctttcttttactgcctcattatatgcatttaaaacattatcctttccacaaatagcacttactaacattattagtgtagattctggtaaatgaaaattagtaataagtttatctaaaactttaaatttataacctggatatataaatatttctgtccatccactagtttctttcatctttccatcctcattacaagctgattctatagttctacaactagtagtaccaacacatattacattgtttccattttccttcgctctatttattttgtcagctgcttcttggctaaccatataatattctgaatgcatcttgtgatttaaaacatcttctacttttactggtctaaaagtgcctaaaccaacgtgtagagttacaaaagctatatctacacctttttcttttattttatttaacaattcttctgtaaaatgtaatcctgctgtaggtgctgctgctgaaccattatgctttgaataaacagtctggtatctttctttttcatctagtctagcagtgatatatggaggtagtggcatatttccaagttcatccaatatttcttcaaaaattccatcataaaggaattttataattcttgaaccttcatctgataaatctacaacttctccaattagctttccatttccaaaagaaaatttagtccctacttttgctctttttcctggttttactaaagcctgccaagtatcttcctctgttctttttaataataaaaactctattttacctccagtttcaagcttctctcctattaatctagctggtataactctagtattatttaatactaaacaatctcctggatttaaatattctattatatctctaaatactttatgttcaatattacctgtctctttatctaataccatcaatcttgagctagctctatcttctataggaacttgagctataagttcctgtggtaagtcaaatttaaaatcacttgttttcaatgttaaacttcctctcttaaaatttctccagctacaataatatcaaaaaaacaacttattttccacaatattaccataatctatcaagaaattgctatttttaacagacaccatatccacaatatatagatatttttccacgatatacatgtcttatccacaatatatagatacaatacacacaatttttatcgtgtttatccacagtatctacagatataattaccattttgtggatatatttgaatttttagccattttagaaatattttaatttaatgactcttttattttataaatactcgtataatctatttttatttttcattaggatatggaatttttaagtgttcatatgctaatggcatggctactcttcctctaggacctctatttataaatcctaattgaagcaaatatggctcatatacatcttctattgtatttctatcttctccaatagaagctgccaatgtatctaaacccactggtcctcctctaaatttttctattatagtcataagaagcttctcatctacaaaatcgagacccaaactatcgactcctaaaagttccagagcatcttttgccaccttatcagttatttttccatcagctctgacttgtgcaaaatctctaactctttttagtaatctatttgctatccttggagtccctcttgaacgttttgcaagttctaatgctccattagactgtatctctgcatctaagatgcttgaagacctaagtactatttttgaaagttcatcaactgtataataatccaatttacaaataacaccaaatctatctctaagtggatttgtaagcataccagctcttgtagtagctccaataagtgtaaatttaggaaggtcaagtcttatgcttctagcagatggccctttccctattattatatctaggcaaaaatcctccattgctggatataaaacttcttcaacacttctattgattctatgaatctcatctataaataaaacatcattttcatttaaattcgtaagtatggctgccaaatctccagctctttctattgcgggtcctgacgtaattcttaaatttacccccatctcatttgctattatacttgctagtgtagtttttccaagacctggtggtccatataaaagcacatggtctaactgctcatttctcgatttagctgcttctataaatatactaagttgttctttggatttttcttgacccaaataatcttctaaagtttttggtcttaaactgttttctatatctatatcttccatcttcattgtagaagttattatcctattttcatcttcaaaaccttgcatttatacccctcctctcgtacttttgaaaatctactttatatattttcaaatttacataaactccttaaatattgttttaaaatccaaatattataaaatccaaatactatttcaaggatttactcattatatatgtaagagctttctttataatagcttctgtattcataccatcttttttacatttttgaactgcctcttttgattccgacaaagtatagcctaaagctacaagtgcatctacagactcatcttgtgatatcaaggtaggtttttgtgataataacgttggttcaaactctatgttatttttgtctaccttatccttaagctctaagacgattctttctgctgtctttttaccaacaccaggagctttggataattttccaatgtcttcacttaaaatatatgctcctaactgtgctgatgatgcaaatgatagtattgaaagcgccaccttaggtcctattttagatacagatgttagtaattcaaacatcttaagttcttccctacttacaaaaccacaaagactcatatcatcttctcttacaattaatttagtatatatttttgtggcttctcccacttgtaaattcattattgtattggatgatacatttattttatatcctatcccattattttcaacaactatactgtctatataaatttcttctactgtaccttttatataactatacatacttaccacctatattctttagagttttttcaagtttgtttgaatgagcatggcaaatagccacagctaaagcatctgcaacatcatctggttttggaactttttttagacttaaaaatgaagttaccatctgttgaacttgtgccttatctgctctcccatatccaactacaccttgttttacttgaagtggagtgtattcatatacaggcttcccattatgagcacatgcaagcatagtaacacctctagcttgtgcaactgttatagctgtttttacattcttgttaaagaataattcttccattccaacttcatctatattgtaattctttactattgtatcaattcctttatacacaagttccaatcttctcgatatattcatatgggcaggtgttgtaactgctccataatcgattactttaaacttgctatttttgtattcaattataccatatccaactatggctatacctgggtcaatccccaatattatcattttttaaaattccccctaaaaataaaagaaataccaaaatgtatttctcataaaaacttatgttctaaatcattatatcataaataatattaacaaatcataaaatgctctatgtaaaatataaaatcaaataaaaaagttatatcaaagcaagattttacctcaatataacttttatatttattacaaataaattattgtatttttataggaattaaatgtgactacaattttaatactaatctatttaatattaaattatttattattaacttacttagtatttaacttgaaataatattaatttactattaacttgcaaagtcttctaatcttgaataggcctcttcttcagtatccataactacaccttttttgatttcatcttgaactgttttaggaagtgaatctactcttatttttgttttttctactaatgttttacttccactatcatcatatttatatagtgctatatttccattatcattttcaatagtatatttaccttttatagtagcgttcattgcttgtacatctttattatcactatatttagattctaccaatatgatttcatttttatccatactctttatttttttagttggatattcttttttaaaatatgatactatttctgattttgtcttatctaataatgactctggaactatcccagccattgtaagtgttctcttatagttagtttcattttcgccttcactttgaagccaaacttcacaatttttatttaatccaaaagcttcttttgacttttcgtccatattcgcactagcacttacaactttactagtttgaactccattattttttaatcttgtccctatataaactccgctacttaatacaaatactccaaccagtattaaggcagatattttccaaggaaataattcttttttcttcttttcaaacattgattacgcctcctttttctattattttctccaagctgtaagtttttatacaatttaggtaaattttagaagaaaatatatttatatttcaaattactctaagaatagatattttctaaaaggtagttttctcttaatggttatattcttgtaattatatggacataatttataataaataatcgtttaggaggtaataactttggaaagaataaactgtaatgtaattaactgttcacataacaacagccatatatgttatgcagataaaatttttataaatggtgaaaaagctcacaatgacagacatacttgttgtagttcatttttagatgaatctatttatagtaatttatctagcaacgttaataatagaaattgtgaggaattagtttgtactgtaaaaaattgtaaatacaacaaagatggtagcttatgtacacttgataatatattggttgctcctgaaactgatagagtaaacctttatattgaaacatgttgttctagtttcgaatgtaaatagtcatagtataaatataagggtgtcaaatgtaattaaactaacatagtgtagagtatctacaactattagtttgattatacttgacacccttatttattttaaataaaatttcattattataaccatgtttataatgttctaactgtaattaaatttgataaatttctataaattggtataatcaatatgtaaattgaatttagcaaattaatcataaaaataaaatatcgagtatatagtgttatactaactagaaatgaggtgcttatgagtacattttatattcaatttctttattttgtaatttatagctttataggatggtgttgtgaaactacatattgttcagttttacaaaaacaatttgtaaatagaggttttttaaatggtccattttgccctatatatggatttggagcattagcaatagttgctaccttgactccttttgtacacaatattcctttgttatttttgtttagtataattataactagcataatggagtattgtacgagctttattttagaaaaaatatttaatatgacttggtgggattattctaaacataaatttaatattcatggaagagtttgtctggaaaactcacttatgtttggtgtattatcattgattgtaatgcttatagtacatcctattgtggttgactttattaactctatctctaaaaatgtgctatttatatttgctatatctatagaaatttattttgttttagatttagttatcacagtccatacaattttacaattaaatggtaagttaaaacaaatcaatcttataattaaggaattaaaagataagaaagaatactacaaacttattacacaagaaactatagaaaacaaacttgaatctttagttgaaaatagactggatactttggaagatagatttgaaatacttaaggaaaaagaaaactatcgctatgctaaaaatcgtattgatgagctaaaaaataaacttaatactttgctgtctaaccacaaattacttcatagacgtataatcaaagcattccccaacataagctctaataagcatacagatattttaaataaaatcaaagaaaatattaaatcaattaaaaaagataaataataaaataaacacataagttaaataataaaaatactaatacataagattaaggtttagaatattttttgtaaaatactctaaaccctaattaatatactattatttttaatcttaatttataattttagtttattttacttttaacacagtaaatttaagcgtttaaacttcaatacactaatatactaccccatcaatatctcaactgattctctaagtgtgctaatctctcccacatttccagggaaaattatatatggcatattaggaaatttgctttctttgcctgtcatccatactggtataccaggttttatctgtcccattactgtagctttttttactcttagtgctttagtaccaacatcactagaagtaattccacccttagctataataaaatttggtcttacattaagcataccaattatactggtaactgcatctgatatttctacagaaatcataagctgtttatctttatcattcgtatccaagtcaaaacgctctcgtctagtataaacagcaacagttttaccactgcttattttttcctctacaacttttataactctttttacctcattttttagaccattttcctgaagaactaaatgttgattaaattctataaattctattggatatttacaatttttaagttcttctaactgttgggtagtcttattcacatgtgaaccaacaagtataattcctccattggtattaccttttgatactaactcatccttagtaagcatttccttatcactcactccgccaagtacttttgttatggcagcagcgcttctaaacataaattccttaccactatttactgctcgtataaacgcaattgtaaatacctttacatctacataatcggttgcatttacaataattttattgaatccttcagcttttttaagtttttctgttatagcttcaatatttagctctctaagttctttagaagaaatatatatcatatcactagatttgtactttccatgtgtcttttcttcacaccactcacctatatcagatgatttatatccaaaagatttatcctttgcaaattcagtcattcctgctggtacaagtatttctccttctttaacataatgtacattatctatagtaaacctaccaccttctttaaaaaatggcattattatttcaccctgaaataacttccccgataatctctctacttcgctttttaataaattagtttcaacaggataatgtcctctcatagtagaatcactacgacttatgattataaaatccttattaactttctttgatacatccacaatattctttgaaatttctttatgtgcttttgtagtttgagcaacagtaaatccccttgaattagtaagtataaaaaacatactatttttctcattaaaaccttgttccatactatccttatcccaatcagtataaacagaaatatcatgaactgtttgtacacctgttgggtcatcatctaatacaacaatttttctatctaaatgcttaagctcatctgcaagaagttcatttaatctgtcctcatctacttgtttaaaagtattaagtatatctatgctaattggttttacttctctcatttaaaacgcccctttatgtaatttgtatagtctaaatgtaatttatataatataaacaatagtttgttatttatagacctggaagtggtataattccatttataacactaagcaataaaaccattataaatgctacaactccagcaatggttcctccaattgtccaagagtttaaagtatctttaactgataatccactaaatcttgaaagtacccagaatccagaatcatttggaagggagaaaccaactcctccagcacatatagcaagccctactaaaactggtgacattccagttgccaaaattgtaggtcctaaaattgatgatgttgttactaaggctacagtagcagaaccttgagaaattctaagcaaagcacttaataagaatccaagcactacaactgatatactaagaccagacatagtatcaactaagaagttacctataccacttgcatttataacactgccaaacgcaccacctgaacctgttatcaataatattagccctgctgaatcagcagcttcaataactacatctcccataggtttatttatgtatctctttaaaaatcctattgccaccaatattccaagaagtattgctatgtttttatctcctataaatgcaagtactccactcattgtagaacctttttctaagaacatactaaatacatttgatataagtataagaagtattgggaacaataaagaaaacatagaaattccaaaacctggtactttagaagaatcatcatcttcaatttttatgctatcttttcccttttctaaatttttttctctatcattctcatcaatagcataagctggatatttttcaaaacgttttccataaatccatccacctataagaactgctggaaaagcaacaattatagaataaagtataaaactacctacatttgcatttacatttgctgcaactgctaaaggtcctggtgtaggtattacaagtgcatgacctactatagtcccaactcctaaggcacatacaaaaaccattagagatttcttagttactctcgaaacatacttaattataggcatcattataacaaaagctgcatccataaaaactggaattgaaattaaaaaacctgctgtagttactgctaaagcactgtttttttctccagtcttagctaacaacccctttgcaatagattctgttgctcttgattctgaaagaatatttccaaatattattccaagtccaattacaatacctatactacctaatgtatttccaaatccagtcgatattgtggttgatatttcatttataggcattctaaccataaagcctgtaattatagatgttatcagtaatgccaaaaacggatttactttaaatttaataatcgatacaagtaaaattcctatagatataacaaatgctatcaaaagtccatatcctgtaatcataatctttacccctttatcattctactttattatttatcaattttatttttcttttactatgataacttaacctcgctgtatttatataatctaatcctaataatatgtatttaattatattgatatatttaaatattaattattgtgtttttttatttcaacacctgccaacttttcaaaatactgtgctattccactatggtcatcttccaaatgtccatgtacttttaatgtctgcataatttctaataattgacttgtcataggtagcggtacatctaaattgtgtgctgtttgcattacattcttaatatctttcaaattaatagatatttttccacctggtttaaaatcacgattcataatcattggtatcttcgcatccaatattgtactaccagctaggcctcctcttattgccttatatactttttctgggtctgcacctgcttttgctgcaagtacaaatgcctcagaaactgctgctatcgtcaaattaactattacttggtttgtaagttttgtaacacttccactaccattatctccaattaaaatagatgagcttcccattatattaaaaaatggctctactttcttataaatttcttccttaccaccagccataaaagcaagtgtaccatcaatcgcttttggctcccctccacttactggtgagtctataaattctaagcccatatcttttaatttatttgcacacaatattgattctgtaggagtaactgaactcatatcgactactatacttccttcttttaaagtttttgccaatccatccatcccaaataatatatcctgaacaatagttccatttggaaggattgtaaatacaatatcacattcttgacccatttctaaaacacttgcgtattttgctccacatgatataagttcatccacagcagatttattaatgtcatacaccaaaagattacatccatcttttaataaattttttgccattggctttcccattattcctaatccaataaatcccaatttcattttataaccctccatatcttcacatttttgaaaacgttttttatgttttagagtatactacataccagtataccggtcaatataaaatataaaagtatttattttaacaataaatagtaatttttaaagtcatttattatatttagtcatcctatataagttttaatacatactattgtttttaaatataatatgctacttttacagttttgtatttttactaatttcaattagttttaattaatctgcctttaatgttaatcatacttcacacttcaataattttttatattttttaatcttatctgcaatttaaattgcaaaagattgaccttattttcactatgttgtatgcttaaaattatataagtttttgtatttttatattgtttaggggggtattattaagtatggctacatttaaaagattacaagaacaagcatatgactacttaaaagaattgatactatctggagaaatgatagaaaatgaaatatattctgaaacaaaacttgctagtgaaataggtatctctagaacacctataagagatgctcttcaaagacttagtcaagatggatttatagatataatcccaagcaaaggatttagaatccatcaaattacagcaaatgaaattgtagagatattccaaatacgctctgcaatagaagggttttgtacttttttaattacaagtcaatacaaagaagctagggcagtagaaactataagtaaattaaaacatcttttagataaacaaaaagatattttactaggtgataaaaatttaaactcatttgcagaatacgatacattatttcacacaactatagtttcatatgctcaaaatactgaatttgacaaaatgtttaacaactatatgtacagaataaaaaaattagctctcgattcattatcacatgaaggaaggcttgaaacaacattaaaagaacacacagatatttttaataatattgcaaatggatgtattgaagatgtttacaaaactactctcattcatatggaaactcctaaatacattaatttagaagatttttgtaacaataagtgattttagtattatactttcatttattaaaaatatatctacctcaaattaatttcctaatttataaaaaatattctataattatattgtaactaatactattctaaggagtgatttttttgaacgaaaatgttgtaactaatgaaactattgacaaagattatgctattgaagaagttcgtatggcatgcaaacattttggtgacttatatttttatttttccaaagtgttatttgaagagtttggtgaagataaaactatcgaaatactaagaaaagttttatttgaaaggtctgaagaaagagctattgctatgagagaaagagctcttgaaaatggagatgaattaattgcagacaatattattagcacaactgatgttccatttctaggatgggttcctgaatttaaagagttacattgcccttatggagcttcctggcttttaagatttgaggaaaacccttggtttaaaaaattcgcttctctttactgtgatgttacagatactactgtagctgaagtatttacaggagatacgtcccataaaataacaaaaaacattctatggggagataaaagttgtgaaagaatatatttccatgatgacaaggtatctgaaggtaaatatacttatggaaataaaaactgtaaataaataatttaaattttctatattcatatactatattttgtactttttcatataaatattataactagtcttttattttacttttgtttaacctaaagataatttacttttaatctatatgaattatcatataaataatcagaaagttatctttataaattatagttttagatttataatttataaaatatttatgttctttgtaaaattttttagaagcttctaatgttatgctataaaactatcttgagaagggctgattgaatgtttaataaaatatatgaaaagaaagaatttatagtttttcaagttaaaaaaggttatgtagtttataatactagaaagagttttgaagaaggtcatacacatttaaagcattttgaagcagcaaagacagctattgatttagcaataaataaaaagattcctagaagcaaagatggatattatctgactagtttaattcgcataagtgatgatggttattacattgataagttaagcgaattgttatatgttagagaacaaaaaggtaaaaaagaaaagtactgtaattctggttatcagatgtaacaagactagttgtgaattataagtaccaatcataaatacctttagtcttaaaatcaaagagtatcagtaaatctataaaaaaacaacttactgatactctttttaattatatgattaatatttgaatttgatacaaaattttatacaaaagtttatgttatctattctgattctttgtctgcaaattggctattataaagcttctcataaaatccacccttttccattaattcatcatgattcccctgctctataatacttccattattcataactaaaatcaagtcagcattgcgaattgtagaaagtctatgtgctataacaaaactagttctaccattcataagatttctcattgctttttgaagcataagttccagcctagtatcaacagaactagtagcttcatcaagtatcaatattgaagggtctgatataaaagctctagctatggttaaaagctgtttttcccctagagatatattagatgcttcttcatttaagaacatattgtatccatctggaagagtggttataaagtgatgaacatttgctacttttgctgcttgtataatttcttctttagtagctccaaatctaccatattctatattttcaaaaatggttccattaaataaccatgtatcttgaagcaccataccaaacattgaacgcaaatctttacgtttcatatctcttatatctactccatcaattttaatagcacctttctttacatcataaaacctcatcaataagtttattaatgttgttttacctgctccagtaggtccaacaatagctaccatctgaccactttttacttctgcatttaaatcttctattaaagttgaattttctccatatccaaaattaacatgctcaaatgtaacatttccttttacattttctatcttaactggattttcaacatcaggtatttcctcttcttcgtctaaaatttcaaatacacgttctatagctgcaaaagaagattgtattactgtagataactgagtcatttgtgaaagtggctgatttatctgccatatataacgcacaaatgcttgtaaatttcctactgttatccctccacttactgcatatatagaaccgacaactgccacagctgcaattccaaagtaagttactaatgaaaccataggattcatcatacttgatataaattgtgccttaaatccattttcacaaagttcttgatttacttttttaaattcttttatagaatcttcttctttaccatatagttttatttcattaaatccagtatacatttcttgtacttttccatttaattttccaagagcattttgttgcaatgaaaatctactttgagatttttttactacaaatttagatacaaaataactaattggaattataaaaagagctataagagccatatatatattaattgtaaacatcattgaaagtgccaaaattatgactaagattgagtttacaatttgcataaaactctgttgcaatgcatttgatattgtatctacatcatttgatatacgacttaatacatctccaaaactattactatcaaaataactaataggcaatcttcttattttattttcgacttcatttcttaaatctctcattgtgttttgaatagcattcgtaagtagaaaacttgaagtatacgtaaaaattgcattagcaaaatatatacatgctaaaatcaccaatatttttgttacataatcaaaatttacggaagcccctggtactccttttgcgatactaattacatctttagtcaattgtgttattatcaatccttcagttttaggtgcaagtgcattcatagtagctgctgaaattatacatataatagctataataaaggaaaatttatatttctttacaaatggaagaagtctaccaattgttttcttaaaacctttagactttttcattattctaattcctccttttttaactgagatgttgcaatttcatagtatatttcacagttttttaataattctttatgagttcccattccgacaacttgtccttcattgagtactataatcttatcagcatcaataatagaactaattctctgggcaacaatcaatacaattgcatcttttgtttccttcttcaatttagcacgaagtattgcatccgttttaaagtcaagtgcagaaaaactatcatcaaaaatgtatatttcaggtcttcttataatagcccttgcaatagaaagtctttgtttttgacctcctgatacatttgctccaccttcactaatcaattcatcaaactttctaggtttttttgatataaactcatatgcttgtgcaactcttgcggaatattctaattctgactctcctgccttatgtttcccaaatctaatattatttgctatgctaccagtaaaaagcagtgatttttgaggtatgaatcctatcttttttcttaaagcttttaaatcatattctcttatatctactccatttatcttaatgctaccctctgttacatcgtaaaatctaggtatcaagttaattagagtacttttcccactaccagtacttcctataaaagcgactgtttcacctgtttttgcagtaaatgaaatatccttaagtacagaagcttctccatctggataggtaaaagttacattatcaaattctatgatacccttattttcagtatccttaattccattttcaggattttttatcaatggttcttcatttaaaagttcttttattctatttgcagatacctctgctcttggatacataataaataccattgaaaaaagcataattgaaaacatggcatggaaaagatattccaaaaatgcaaccaactgtccaacttgaagctctccaatatttatcttctcacttgaaatccaaaatacagccaaaacagctatatttaatagtaaaaagaatgctggttgagtaattgacataagcttaaatagtttcttagaaacattagcataatatgtatttgttttttcaaatcgctctgtttcataatcatcatttccaaaagctctaattactcttattccagttaaattttctctcgatataaggtttaatttatctagtcctttttgttgttttgaagatattgcctgagatacttttgctattattgctactccaataattataaaaggtactgatatagccaatactatagaaagttccacacttgttctaattgtcattattatacttatgatgaacataactggagttaataaggcagtccttagtagtatattaacaaattgttgaatttgaaatgcatcattcgttgttcttgtaatcattgaagaaattccaaatttattgtattcagtatgtgaaaattcttgtgatttctcaaatatgtcatttcttatatctctggttacacttgttgataccttagcagaacaataacccaacaatatactacctacaacccctataatagaaataataacaatcactattcccatttgttttatgtaagctatattctgatttgcaataccattgtcaattattttagctattatagttggaatccccaactcgactaatgcaaaactaaatatagccagtatgtttaatactattaataacttataattctttaaataacttaaaattaatttcatatttttctcctttcttaatttttgagatagtgtaatcatgtaataatactaaatttataaatgcttaattttataaaaaaaggagaaaagagttaacgcactctcttctccagcatattctttttaatacaccctccgacaagtcgcttatatgttaacatatttgacaagtaatgtcaattcatatagctaaaagtcttttaaatgcttcatctcataacattgtaacaaattggcatgtaatttatttttgttttttactgtattccaattttacaagttctccaatattactaactttcttaaaattcaaattagtcttatctataccagacttaaatagtgaaatccctctccccaatattattggcaatatatatatataataatcatcaattaagttatctttcataaataattttactatatcgcctccaccaactatccaaatatcttttttatccttcttttttccaatttgctcaattaattttttaggttctaaattagtatactttacattctccagttgtcccattaattgtatttgagtatatatagcattccttacccttatagtaccattcatttgggcttaattcatttgcaatctgtacatatgtggaatttcccataatgatagtatcaattgtatcgtaaaaagtattataatcatcttcctgctcattcttaaattctgaagatatctcgtctaaaaaacttacactgccattctcttcagctatataaccatctaaacttgtggcaatataaagtactacttttctcatgtttactacctccaacatttatagtgtgattattctatgtaaacatcacttttttactcattcaataataccctattaataaatcctcaaactaatttaaataaactttgcataaaactaaaaatatattatataaataatttaaaatcacactaacttattgaaaattctaattattacaaataaatattgctctctgttaacgctagttttataatataattataagctattaatattataaagccgatattactaatataataattatagttaatttacttttgttgaaaggtggtaaataacatgaaaatttcagaagtcgctactccaaattttttgctagatttagaccagttagaaaagaatatagataaaattcaacaaatttgtacaaataataataaacaactttggcctatgcttaagacacataaaagtacttacatagcgagacttcaaaaaaatgcaggtgctagtggttttctagttggaacacttgatgaaggtgaagctctgataaaagcaggttttgaagatattatgttggcttatccttacatgggagaagtaaatataaatagaattgtgactatggcatcaaaaataaatttaatctgtgctacagataatatagaatgtgctaaggcttatagtgaagctttttctaaatcaaaaatagagtgcaagctacttattattgtagattgtggcttacaccgttttggggttgaaccagaaaaagtggttgaacttgctactgaaatttctaagctagaaaacatcaagattgttggtataagttcgcatccaggtcaagtgtacggttgtagttctccagaaggtgttccagatgtttgtgttcaagaagattcttctatggagaaagcatacaaagctctaactgataatggatttaatatagaaattgtcgcttctggtagtactccaacagttgaagctgaagctgcttctaaaactataactgctgtaagacctggaaactatgtatactatgatgctatacagataggtttaggttgtgctactgaagatatgtgtgctcttactgttgtgtgtactgtaatctcaaaaaatagcagtggatattatttaattgattgtggaagtaagtgccttggacttgataaaggtgcacatggaaatagtagtattgttggttatggtagggtatgtggacatccagaacttactattgattcactttcagaagaagttggaaaaattaaagtaaatggtgaaactgatataaaaattggtgatagaataagaattatacctaatcattcttgttccactgcaaacttgacgagtaatttattaggttttagaggagatacaatagaaaaagtcatagaagtagatattcgtgaaaattcaaaacaaatcatcctttaaaaatatatttattttgatattaacatcatgaaagtatatttttcttaaaattattgttaataactaatgttaatgttggataaataaaaaacataaattctagaaatataaatttaaaaaaagaggctgtctcaaaattggatatgtccctgtcaagtagacagacttaaaaaaggctatctttatgcggaatgagttcgatattcaatcggactcattccattttttaattgtattctttcattattataaaaataaatataatcatttattagactaatcatttcctttggatctgtagtatcaattaaatatattaattcagatttaaaatgactgaaaaaactttctataggagcattatcccagcagttgccccttcgggacatagattgtataataccattatctttaagccttttagagtaagatctacttgtatattgtgaaccttgatctgtatgtaaaatacaatctttagctaaattcatatttattagttgatttactgttttattaactaatttagtatccatttttgtacttatctcatatgccactatttcaccattaaataaatctttggctacattcatgtataagaattttttaccgataggtatgtatgttatatccatacaaattttttctaatggttgattagctctaaattcacgatttaatatattatcatatacctcatatgatttaaacttacgtctatatactttctttctaataatagatttaattcctagttctttcatcaacctatatactttcttatgattaatagggctatcaagtattttatttaaataagtacaaattctttttctaccgtaagttcctctatattttttatgtatttcaattatataatccttaataattctatctttgatacccctatcggaagattttttagaataacttagccatttatagtaaccgcttcttgacacacctatcaacttacacatactagaaatactatacttcctagacataagtttaattgttttaaatttatcgcttactttgacttgtccaatagggtacttaacttttttaaaaattcattctccatgcgtaagtacttcaattcttcttcaacagatttaaattttctattatcattttctagactaatatttttaaatctgcctctagtttcctcattaaatgcagttttacctttatttttataatcttttatccagttttgaacttgtgttttgcttcttatattcagcatctcagcaattttgtatgatgagtatccttcttttatatataaatttacagcttttagtttaagttctttgctatattttttatgttttttagacatagaaaaacccccttagagtatacgctttttagacttattataatagccttttatttaaatgtctactataaggggattatactaaaatagagataagcctctctttcattgttgaaattatgaaaatatacttgatttaataccaaaagagtatctcatgaactaaaaagttcattttgagatactctcttcttttttaattaatatacatattaattactatattagtttattactatatatcaattactattcattaattactattcatcaattcttatatatcatttataattaggttataattttatgttatttacattaatcccataacagtgagtaaaactcttactatcaacatccccactattgcatcaaatataggaactgccaacagtaacattctatacttagtactggcatttgctacaagcactattctggcataatgaccaactagagtacccattaacatacatggcataattaatatggttgcttgtggtgcagtgattagaccttgtgcaaataagtttgcagctgtagctgctcctgctgccttagcaaagaatgctgctatcaaaactacaacagattccccaggtagtccaaaaatacccattactggaccaaaaatatttcctaaaatatcaactaaaccagttaattgtaaaaactgcactattacataacccattatcatggctggtaatatctgttcaacacctatgtaaaaacctttttttgctccccccataaatatctcaacagcagttttcttaggtttactatttacaattgcatttccagtattttgttgactcatactacacagcctccttagccttattctttttatttcttacacctatgattaatctaactagattagcaccaagtattttacagaatatctctataaggattattggacctaatgccaataatgctattggtaaaagtggagcttgagtatttattgtgttcagtataacagctgaaccagcatattgatatgctacaaatatagttctttcatcatctgttatttccccactttcaaataattctttcgtcattattgaggctacatctgaactagtaaatgaagatacaaatgctattcctgctattccaggtataccaagcagaggtctaagtaatggattaaatatctttgatgctgctttcattcctcccatagattcaactacatctataagacctacagcaaaacagacagttggaatcaaagtcagagcaaataagaaaccatcttttgctcccgttcctcctttacccataaagtctacaccatctgcaatagtaccaaatgaacctgtcagattagcaaaatctaatgctttaaggaagccttgactatctttaaatactcctgaaaataatactatcaatacaaataaagataaataccctttccatgttaccttattatctccagctgttacatccatataaaatccccctttatacctcaaatttatctaagtttaaaataactgtagaaattaatttcaccctctcaaacatagaatctactactgcatattctcttgatgtgtggttccattctcctcttacaccaaatgaacagattgtaggaacgtttgcaatagttaaataacttgcatctgaactacctccaagtctcttagcatttaattctccaaatccattttctcttgacacttcatttacaaatgtatgaaatctcataacatcttctgtagtttcaaatggcatcatttcacttataaaattaacttctgtagaagttccttctatgtaagtttctttacatatctctctaacttgttctttaacattctccatttcttctactttttcaaatctaaggtctacttttatactacaatcttctggaatagaattttccactcttccacccttaatcacacttacacttactgtagttccaacatctaaattagtcaatttttgtatgcgtagtatcttattagccatttcttctatagcatttcttccaccttcaaaatcattacctgcatgtgtttctacaccttttacatgtatattacatcctattcttccttttctacctatacataaactattatctactaatccagtttccatattaaaagcacaaagagcaccttttgcttccctcaatataacatctgcaccagttgaatctttatgacctatctcttcatctccagaaaatactatttttattggtctttctttgtatcctattttatttaaagctttaataacgtataaagagattattataccccccttcatatctaaaacacctgggccatatgcttttccttctattattttaaatggattctctccaaatgtacctgtttcaaagacagtatccatgtgtcctgaaaaaattatcggctttttatctatattagaaccaagtgtacctatcaatgtattaccattttccccaacatctactagttcacaatccaaaccttctttttcaaattcaagctttaatctctcagctaacttgtttacactttctttacaatgtgtataactttctatattaacaatctctttccataatgaaactatttcttctctattctcatcaacaaacttagaaatttcatttaaatatgtattcataatcttctcctttattttcaaataaaatgtatttctttcctaaaatctaagtttattttaggaaatcttaaaagactagtccttaattacaaaatagcacaattattcttgccagtcaacatatttttcagtcttttttatattttctgatttttctttcaattatccttttgtaaaataaattgacgcgttttatctactattataaaatgaggttataaattgattgattagttacaatactctcgaaattttaaaggaggttttatgaaatataaaattggttttttgacaacatcttattttatgtcagataagtttaaacaagctcttaaagaattaaatgatacttgtgaaattacatttattgagcttaaaggggagaatccttttaataatttacctaatatatactatgagcaagtagataattttgatggatttgtatgcagtggtatagttccatatagtgaacttataataaatataaaagacataaaagttccattaaattttttaaagcttgatgaaagagatttttataaatacttattcaaattattaaatagccaaaaagatattgactttacaaaatcatttatggattttttaagagaggacaacaattattatgatatatattcattaatagactctaataaatgtccatatacaattaaagattttaatatccctcaacctgtatatgactttaaaaaattaaatgataaattattggaaatacatttagacttattgcgagataataagattaacctttcttttactagaaattacatcattagttgtgaacttaataagcttggatatgattgtatttacatggttccatctacagaatcaatcctgaatacatttaaatctctggtgaatgaaataacattacaaaacttagacaaaaataaatctgcaacttgtatagttacagtaaatagttcagagtacataaatgaagatttgatatttaaaaatgatgagatacaaaatcaaatatataacactatattaaattctctatcaagacatggattctatggagttcaggtcaaaaaaaatgatatgaaaatagagatacacactactaaagaaatattaaacaatatgaccaataactatacagatttttttatttcagaagatttaaaagaaattaaatatagcttaaatataggttggggcattggaaatacaaatattcatgcagagcaaaatgctcgtcaggctaatggtaaatctgcttctttgaatggaaactgtacttttatagtaaatgatactaatgatacaataggccctttatattcaaataaaaattctaataatattgaagatagctcaatagccaataaagttgcttcttttatacctctatctaatacaaatgtatctaaaatcatgtgtatgattaatgatagaaattcaaataatgtgtcagcagaaatattagcagactatatgaacataactcttagaagtgctaatagaatattgagtatcttatataaagcaggaattgcaactattgtaaatacaaaactcgataatcaaagaggaaggccaaaaaaaatatataaagttgatttcttatcttttctaaataagatgcagaaattaaattcttaatatttaattttttaataaaagcaatgtattttctctaattttaaagaatcaaaatgtttaaattttattagaatatacaactttttactttaaaatacctaaaccttttatcagtgaaataaaccataatatatcgtagcttattagaaaaacaaaataatttcatatacaaataataaaatagccactacaatccataatttgcagtggctactttttacactatcacttattacttaatttttaaaaattaattgtattttttaaataatttatacacacctattatcagtaaaacaataaatacaagtatatctataaaaataattattgtaacatgtctggcaatattgtaaataaaaagtatagagaatatttctatagacaacgctacaaaacacataaaattcgttaaataatctgcaatagtatcactataaaaagcatgtatttgtaaccatctccatataaatggacgtaaaaggattctgaatacaacacaaatgacagggtaggcataaataaattttttatctacataattagctacaccattattccattggataggaatttgaggtggcaactttggaaatactgttattgcaatcaacaaacaagcaatagtaataattccccaggtaattttccctccccatatatataagaaacttacagagtcaagtttaaaaacaggtttgtttttattccagtattctggcaactcagttatgtattgctctactttcaaattcaaataacttagctcatcagattctaacattttattacacatagtttttgcattttctaagtctgatattttagtttcgagaactttctcctgtttctctacaacttcaactaaagatactttctgtaatataatattacggatatcatcaatagtaattcctagtgtacgtaaatatgcaatttttttgatgtcctctacattttcatctgaatattctctatagccattacgctcattacgaaggggtttaattaaattctcgttctcataaaaacgaatattagagcgtgtcaatcctgttttttcttcaacttctttaattgtcattttaaacactacctctctattctattaatttacaactataatatagtcttaaatattttcactctataaaattgtatatttagtatatcttaaaatcaagttaattatcttttataaattttcatacaataatatctcctttcaataatatctctttttctatatttaaaactatcttattttctataaaataatgtataaacaaggtttacagtcaagtatttttattatttttttgatttcataaaaaaaagcatagcaaatcatttgctatacttttttactaaattatttattctatatcttatatgaacttattgtttaactactacacaatactagctttaatcatcatattttttgcaaacatactggcttcatatatttcttgttcatctggatgactttgagattcctcatggttatttaattgttggcgaatatgttcgttgtcaggagaaagttttaacatctctttatattttgctttcaatccttctgctatcttaccttgacatatgaatgaacctaatatttcattatcttttgggataattgattctatcttttctattatactagctccataacttccttttttacttgctcccattgttccaaatagtgctatctttttattgtgaatattttcaagcacttgttttgaatttttatcacaaattcccttgtccacccaatagcctaagaatactatatcataattttcatagtcaataccatactgaacctcccatgactaaagtcacagggttcctgcttcatagaattttgcatactaaaatatgtcttactaattctccacaggctatccccgtagttcctacggttcttacataagttatttattttgaattgttattagtcttaatccttcttttaatatatttatacttgcatttatatctctatcgtgagtttcattacaactaggacaaatccattctcttatatttaaatccttaacttcctcgtttttatacccacatttattgcatatttgtgaacttgcaaagaatttacctacctttacaatttgtctaccataccaattagccttgtattctaattgacgaataaattctgaccatgatacatctgaaattaagcgagatagtttacgatttctaatcatattctttacttgtaaatcttctatgcaaataatatcgttctcttttattaatttagtagataatttttgcagaaaatcatttctttgattagctatatgttcttgaagtcttgcaacttttaatcttgctttattcctatttaaactaccgattgtttttctcgataattctctttgtaatttagcaagtttgtttaatgacttcttaagatacttaggattttctataaattctccacaacttgagatacaaaattctttaattcctaaatctaaacctatctgattgttagtattttcaaatgcttcaatatctacatcagtacagcataatgatacataatatctaccacttggttctttagatatagtagcattaagtattctccctttaggtacttgtttatcccttactttaaccataccaagtttaggtaattttatatgttgaccacaatacacgatatttccatttgtaaagttagttttatatgaaaatctattaattttctttgatttaaatttaggaaatcctgctttttctttaaagaattttttatatgcattatctaaatcttttaaggcgttttgtagtgaaaatttgtcaggttccttaagccattttaattctttttttaaattggtcaaatcagaactacactgtttataagtaaaagtttctttatcgtttttataaacttctattcttttagcaagatacttattatatacaaatctacaacatccaaaagttttgttaattaactcttgttgttttttatttggatacattctaaacttataagcttttttcacttctatcacctcacgttaattgttttttgatacactttttaatgattttatcatatttaatatattatataatgctgtggtgaacaatttattaatcacctatcataatattaacaaatgtaattatttaaaacaattatttagaaggttttatatttaattttaaataacatatttaagaaccgtaagtcttaacttttatcatttttgaggttgtcgttcacataagttcgctactacctatgcagttctcttatgaacttcttacactttcatgcaagcacagactatatcttatccttcggcattatccgttaaggtctacccacttccactaccgataacttgtagtgtacttccctcaagaggaatagtcgttgaagtttctcctattcggagtttacctgctgattgcccattttaaagtacttaggatttaaccttataccatctaaccaattttttctactttcgtaactttcacacttaggtttatttcatccttatgttttagtttgattagctttaggggtttccagcaattcaagtagtattggataggttctatcctatctctacatataggtttccctatatgctgactattttagctactaactcatgactaaagtcacaagtgtgcgtagctattttttaatcaactaattcatttacatctttaatgtctttttcttcttgaatttcatcatatatagcataagcaatctttttagtatttccagttaaacttgaatataaaactaaacttttcatgatgtctcctcctctttatctaaatacttatctaaatcaccaaaaatatattaaccttaacaaattatttatttttataaagatattctaatctagtatacatccaaactgagagcgtgtttgtaaagcatctgcacacttcttattacaataacagcactttttaatctcatctactcttccatcttttactttctgtaaccaattactatctgctagtaattgtcttgacatagaaaccatatctactctattatttgaaataatactttctataaaatctgggctagacaattttccaaccccacatactggaagatttgtgtgtttctttacttcatcagctaaatataaaaaacagccttcatctttaaagtaaggatgattattggttggtatagtatcttctaattttgaatgatttgcaagtgttacatgaaaactgtttacacctagggattcaaattttttaacaaaatactcaacttccgaaagtaaaactcctgcatttccataatgaggattttcttgtcttattgcaaatttatagtctattggaatgtccttaacttcatctcggatactactaattatttcgcttgcaaatctacttctattatcacacgttccaccatattcatcatttctattattaaatatacttgatgaaaaacttcctacaagcctatcaccatgaatttgaatcatgtcaaaacctgctttttttgcattcaatgctgttactttaaataaatttataatatttttaatttcttctttgggcatatttgttatgtaatcttttactccgtcattcattattttttttatctcatcatgtgaagtaattcccatcttcatagtatctttaattaaattaacatcataatctgaacaaaatagttgtgctgatacctttgcaccagaattgtgtatttcatctacaattttcttgtatttaatgactccatcttcatccgataggcttatagctaccttatgaaaactaggtctaatagatacatctcctagagtaatcagagctactcctgacttagcaatatcagaaaactttttaattttttcttccaatttaagacccatgcttgtaggtgcaaaagatactctattttttaattccaaatttccaattttaattggttttaataaattacaatacatcctatccttcctccacagctgtttttatatcctttaccacatgtaaattctttaccagttctttatattctgtatctgagaactctttttttatgtggttatcccactttgaaaatatgttttttatatcccctaatacttcctcacccttatctgttactctcaactgaaaagctctactatcattagggttttggattttttctatgtatccatcttgttctaacctagatatagttcttgttgtatgagctttatcaacttcaaattctgtagaaacatcattcaaagaacaattcctatttttattaatataaattaaatagaaatatagaccattcgtaagtttatatggttttaaacatttttcacaataaagtttaaagtttttttgcaagttacaaataatatatgacaaactttcatactgtaaatttttaaaatccatcttaaatttcccttctataattataatatgtttgactatatcaactatattatattaaacaattaatatagtcaagaatattttattctctaaatctatgttttattaattctttaaaaaactattatataaaataatcatgataaaattagaaattggaatttttaatatgcactgtacataaatatattttatataaaagtttatattttcaaacaagtaatttttcgaaaattgtctaaattcagtaaaaatatggtaatatatacataagcaatataaatctataaaaaggagtgttacatatgatatctaataaaatgcaaactttagttgcaaatagttctgttataagagctatgtttgaagaaggaaagaaactttctgatatttatggtgaggaaaatgtttttgattttagtataggaaatccaagtgttgaacctccagagactattaaagcagttataaatgatattttaaatgaagaatctccaaatttagttcatggatatatgaacaactcaggatatgaggatgtaagagatgctattgctgaacatataaataaaaaagatggattaaatcttacaagagaaaatttaattatgacttgtggtgctgctggtggtctaaatattattttaaaaactcttttaaatcctggtgatgaagttattgcttttgcaccgtattttggtgagtataaaaattatacagaaaactatgatggaaaattaatagaagttcctacaaatatagagacttttgaaccagatttagatgctctaaaaaatgctattactccaaaaacaagagctttaataataaacactccaaataatcctactggtgtcatatattctgaagaattattaaaaaatcttggagaattattggattcaaaacaaaaagaatttaatacaagcatatatctaatttctgatgagccatatagagaaataatttatgatggtgccaaagttccttgtgtactaaaatactatagaaattcatttatagggtactcttatagtaaatcattatctctacctggtgaacgtataggatatattgttgctaatgggcaaatggatgattttgatgatgttatgtcttcattaaatgttgcaaatagaatacttggatttgtaaatgctccttctctttttcaaagggttattgcaagaagtttagatgcagaagttgatgtaaatatttataaaaagaattttgaccttctatataatagtttaatcgatatgggatattcttgtgttaaacctaatggtacattctatttgttcccaaaagctccaattgaagatgataaaaaattctgcaatgatgcaaaacaatttaatttattattagtaccaggttcttcttttggttgtccaggtcattttagagtatcatattgtgtatcttatgataaagttaaaagttctttaccagcatttgaaaaattagccaaattatataatttaaaataactaaatcaaagtaattcaaataattaactaccttagtatagaatacttacattctatattaaggtagtttataattttatgtactatattttatacataccatattattccaatatgcttgaatattcttatctatagtactaatataaattacaaggaggtgtttgacttgaaaaaaggttatgtttatataatactgactaccttattttttagttcaatggaaattagtctaaaaactgtcactaatgactttaatcccttacaaataactttatcaagattttttgttggcggtttagtcttactaccttttgctgtaaaaagattaagagctcttagtctttctattacaaaatcagacttaaaatactttgcatttttaggttttatgtgtgtagtagtaagtatgtcattgtatcaactggctgttctaaacacaaaggcatctgtagttgctgttttgttcagttgtaatccagtctttgtaatgcttttagcttacttaattttgaaggaaaaaatatataggcacaatgtaatttcacttatattagaagttcttggaattatagttataataaatccattgcatacaaaactaactcttagtggaatattcttaacattatcttctgctattattttttcaatgtatactgtatttggtaaaagaaaaaccttaaaatttggtggaatagttgtaacttgctttagctttatatttggtagtttggaaatgttgatattggttttactcactaaaattaattttatcgcagatatattaaataaaaataaacttcatatatttgcaaatatccctatttttagtggatataccttacacaatatgcccattatgatttatgtattcgtatttgttacaggtgttggttatgcactttactttatggcaatggaagctacatctactagtcttacatctttagtattcttctttaaaccagtactatctccaatactagcattattaatacttaaagaaattatccctataaacatggttataggaattttattgatagtaattggttcaataatttctattatacctacgataattactcaaatgcataataaacacgttgaagccttgtataaggagtagtaattgataatctatcaagttatacataagacaaaatttattagatttaaacgcaatataaaagagatgctattataatagcatctcttttatatttattttaaatttattaaagctctatttagctaggttttgcaaaaagctataagtttgtggacaagctgattttaacttactatttgtatcttgatttaaatagtaatatgcaaatgcttctgcaaaaaattcttctggatatacacctaagtagtttacattacctaaagaacgaccttctttagcaaatatttgtttgaattgtgctgatttagatatatcatttaatactatatggtctattgcatgtgctgtttcatgtaattctaaatttattgcatcatgccctttacctttgttactaaatcctattctaagagctactgtacttccacctaagcctggaacatcatcccaagtttttccagtaccttcccatcccttaggaactacaccttttaaataagcatattctttttcatctgttaactttccacttaataattttatttttaagttatcttgctttaatacatttaaatactttccatctatattagctaatctatttaccatagcattagcttcgtttttattgtaatttccagttggaaaaactactatttgactaagtgtgtctttattttgttgtatagtagtactatatgcatgtgcacttactggaactgaacttattaagaatattgatattatagctattaataattttttacttggtctcatattattccctcctttgagttaggccgggagtaataaatttcaaaataaaaaagatacccaagagtatctttgtatatacaaaaagaaatttttactcttttcggcaactggctggcatggtttactaaactttagcccctatagctttgcgtgactaggtttccctagttttgcctcatttaattttatatctatattatagcttatatctttttaattgtctatatccctttggaacttttttctaaaaagttattatttttttacataaatcttcaaaaaaaaatatcttctaacaatattttcattattaaatattgttttagaagatattttttaatataacttatattttttataatgttagggtctaatttgtatttttatttcttcttaatacgacaagtcctacaatagctcctataactaaaagtatttctccaataattgtagtactatcccctgtttttggtggtactggtggatttaccaaagtatcatctttagctttattatttttttcttctgacactgatggctttaccacttctggtattggaacaatctgtttaacaggagtttctatcacctcttctgatggtggtactggtggattcaatatctctggtattggaggatttattatatcttctgacggtggtactggtggatttataactatagtatcctctgtatcagatggatttgatggtttccttggtttatctgtgcttggtggcactggtggatttactattggttcatctgtatttggcggtacaggtggatttactggtggattttcttgtcttatgttttctatatttccgatatctactattctaccaatatctttattaccaatttcaaccttaattttatccttcagtttttcatatccacttggagccatcacttctactaaataatatattcctggtttttttacactagattgaattacaccatcttcatcactaactaaatccttaactactatatttccaaatgcatcttctaaattgaacttagcacctgaaagtacatttttatctaaagcatccacttttttagcttcaaaagcataaccttgcttagtagtctctactcccggaggacttgaaccattaatctgagccacattttgtatagtctccccaacttttacatttgtgaagtctgcatcaaatgtaacccagctttgcacaggttccccttcttttatctgtttaaattcgtatttatttactaatcttattgtattttttccatctccagcttcttttttaagttcaagattatcagaatattttatattagatatttttagagatgggtttacttcatccaaaagatttacttgtcctgcatcataaaccccataagttgacatattgattttgtatttaacaatctggttatcactactatttaaaacctttttatcaacttctttttttgcgcttattaatccagaatttttcttaaagtttatctcatcatttttatcaatttcactattatttgcatcaaggacagctctatttatataactatcttcaatactaattacctttaatgtataagctataaaaaactttgattctacttcttctttactgagattaattgtaaatccagttataactttatctacttgcccactttcatttcttttttcttctactttatatgaaatattattggcaattttttctttactccaaggagtccagctcccattcattggaacttctacaactctaaaatcatgcccatcctctcctgaagtagtcaatctcataccttctggtatattatctgttataacaacattacttattggtgatttatcatcatttattgaaatctgatagtttattacttgaccaacttgagtaatatttgttgctcctgaatgtcctttagtaagaagataattatctcctctatcaaatatacttacagtagcatcatcttcttgtatcttcttaccatcagattcaatcctagctacattcttatatttattaccatgttttgcatttttgtcactgattctagccttatacttaacagtatacgatttatctatatttccaaaattaactgaaatagaatttttactctgttcaatattaaaatcactaacttcttttccatcacttgttactacacttacagaaccatttatcaatgtcaatccttcaggaagctcatcatacaaaataatatcttttaactcttcctgcttttcatttacttgtatactgtaatttatatctttatttttaactggcataaatacagtagttgattttcttccttcaacaagctttttaagtgttcctttagcatctggaacatccgttttatctccaggttttatttctacatctatatctccacttccactttctatttttccagtggtttcaatatgtatttttgcattagtatcttcatcaacctttttaacatatgcttccaaacctattttaccttgcattacactttggccattaggtaattctctaaatgtaagtgtatactctccattactttctgttttatcaaagcattcacttgtataatctaaattaactttattgaatacatctggcaccttaaaagttattgaatctcctgcttgtattccttttgatgttggagtataagttaaattaaatgatatttttttcattgattccgtttctattgtattgttattaatttttacaacaaatccatagtcttcattaagttcttcttctaaaactttcaataaattttcatcttctaatagattatcttcctctggagttttttctgtatttttattgtctagtggtttttcatcttctaaagcttgttctgactttttattatctgttgacttatcttcttctggtatttgctctggctttttattatctattgacttttctccttctggagtttgctctggctttttattatctattggcttttctccttctggagtttgctctggctttttattatctgttgacttatcttcttctgaagtctgttctggttttttattatctgttgaattatcttcctctggggtctgttctggttttttattatctgttgccttatctttctctggagtctgttctggttttttattgtcgctttccttctcctctccagttgatgaattagttgaaccactttgaatctgactattctctcctaattctgaagcataagatacagttggatatattgtagacaccaccatacttaaaatcataattaaactaattaataatgcctttttatttcctttcttcatataaattttccccctctaggttatctatagtttataatcttccattaatatcgtatataaattaatttttactaaaaaattatataaaaaaagctatgaaaataaataaatttatattcatagccggttgcaccactgactcagtatatccataaggtgcccaataatagaatatacttcaacatctctataatatttcataaaaacaattaaaattgctttatttatattaaaaatacaattatatacttctattatattatgcctctatactattgtctatcttttttacattttttaccttttatgagattaattaataattaaataaaatccttatctacaacaattacacaattatattcaggatttatctccttaactaattttgttatatcttcttttaagtcatcctctgacatgtctttggaaaattcggaaggattaactactatatcaaatattaaattcttcttgcttccttttccaactattctaaaatcatgcatagattttacaagactatttttcttaagtatttcttcaagttcttttttggctgacataacttctttatcttcaagacatattgggtccatgtgaattactagatatatatctaatttttcagatatttctctctctgcagtatctataatttcatgtatttccattatatctatgttggatggaatttctgcatgtatagatgcaatacatctaccaactccatagttatgaataattaaatcatgtgtacctattatatatttataagataacaatagctctataatagaatttaccatttcttcatccggtgcttctcctaaaagaggatttatagtatcttttacaagagagaaaccagcataaagtatcactaatgatactacgataccaacatatccatctataggaaaattagtaaatctagctacaataaatgatataactacacaacttgaagtaaatacatctcctaaagcatcaagtgaaactgcttttaaggctgaagaatcaattttatttcccacaaatttattaaaacgactcaaccagattttaatcattatagatacaattaaaagtataagtggtattacttcaaattttacaggaattggatttactatcctttctatagatgactttacaaattgaagtccaaccaacatcaccataaatgctactattaatgctgataaatactctattcttccatgaccaaaaggatgttctttgtcagctggcttacttgctaatttaaaacctatcatagttattgctgaagatgccatatcagaaagattattaaatgcatcagccattatagctatactagatgtgaacattcctatgaatacctttatcacaaataaaagtaaattggacaatatacctactacaccagctacataaccatacttatttctaacatctgtattttgaacgttttcgctatctctgataaatgttttgactaggattttggaaaacatgaaacttacctccctgccctttattttattaacaaattttataatctatatctttatttatgataacataatttatatataaaattcttaaaaatcactctacttcagtaaaatattattctatatatctatttagatacaaattttatatttcgtaaagtttttatggcttagtgtctgtttaatagattctatataagtttttacaaagattatttattatgataatatcatttttcccaagtattacttagaatatgatttttttgttttgtctttacatattttaaatttatactatatttatgtttttataaccttatgatacactataactataagattttaaacggaaaggaatgaaataaatcatgttttttatcagtgatatttacacaaaatcacctattaaatttgatactccattgcaaaaagaggtatacaaaatattacaaaagttagatattgactttgaacgtgttgacacagatgaagcaattacaatggaagattgtgttcagattaataaaaaattaaatatgaaaatggtaatataaaacaacattaaacaaacaaaaaccgcaaagttacaatatatagtactttgcggtttcataagaattaatttttactattagagttcatacttctactatttttcattgttctaagtattagctttacaaattcatttgacaataatatagtggatgcaaatagtattatttttatccacatatcaaagtccaaagaaacagaattaaagaaactctggaacacttgtgtaaatattatttgaattatccctgtaactactattatttgcaatgccagtttatttttaaagaaatttggtattgtactatttaaaccaaattctctacaatttaatgcattaaaaagggcactgaacgcaaataaagaaaatataacagtaccttgttcttctgatgtagctcccaatatattaaaagctgattgagtaaatacaattgtaattataagaatagcatttataataatatttacaaacatagacctagctattattccagaatgtctatttattggttttcttttcaatacataatctctaacaggttctaatcctaatgctagggctggaggaccatccattattatatttacccataataattgtattgtagtaaatggcatatccttaccagtaagttgagatattatagcaattataaatgctactatatttacagtaagctgaaactgtataaatctttgaaagttctcatatatacctcttccccattttattccctctactatagtactaaagctatcatcagtcaatattatatctgctgcatttttagatacttctgttcctgaaatacccattgcaattccaacatctgcttgactaagagctggggcatcatttataccatcacctgttacagctacaacttcgccacttttttgaagcgctgaaactattctcatttttgtatctggtttacttcttgcaacaatagatattcctttaatttcttctctcagttctttatctgtcaatacatctatatatgttgcttcaactgcctttttcccatcatttaataatcctaattcatttccaatagccgttgctgtatttatattatctcctgtaagcatttttacatctactcctgcattaaatgctttatcaatggaatctttgaccccttctctcaatgggtccactattcctacaaatccactaaaaactaaattatcttccttcatataacttcttgaatttcctattaaattcaattcaccttctgaagtcattgcaacttctgttttagaattactcatttttttataagcaaatcctaatgttctcatagatttaatttgtaacttcttaatctcatctaaaatacttttttctacttttggagttattggaacaatattttttccttgttgtacataagaacatttttttaataatacttctggagcaccttttgaaagtaatatatctgaatcctcttgacgaattaatgttgacatcttcttttcttctgaactaaatggtatttgtgatatcaaatacgtttgttttctcatttcattatagttcttatcattatgatataaaagtaatgcacactctgttgcacttcctatatatttaaatgaattatcttctttttctatatctgcagttgaatttactatacagttttgttcaaaatagctgttactttgatactctcctccacttatatatttaccatcaacatatgctacctctaccatcattttgttttgtgttaaagtccctgttttgtcggaacatattacagaaacagaacctatagtttcacaggcttctttctttgttactaatgcatttatctttgccatcttttgcattgttatagctaaggtaatatttatcatagttggcaaaccttctggaacagttgcaactattaatgcaatacaaaccatatatgcatttttagcaggttctaatgattgtaagaaagataatatactgcttgtatctaaaattaacataccttttctctgcatctgtataatcataaacatacacaataaagtagctattacgcctgatattcctgctattttagcacccaacttccctaatttaatttgaagtggagtttgctggtcttcatttgataaattctgtgctatcttacccatctctgtcttatcaccagtatgagtgacaaccattatgcccctaccatatgctacaagagtccctccaaataccatattgacttgctttgcaggtattgcatcctgttcgattatttctgttttagaataaactacttccatatctaatacagcatcagcattcttagctacatcatcagattctcctgttagcatatcttctctaagtttcaaatttatagactgtataagtcttccatctgctggtatcatatctccagtttctatatatacaatatctcctggtactaaatcattttttgatattttaattatctttccatttctaagtacttttacttctatattttctgttaattttgacagggcctgagctgcttttttagattttccttcagttattatgcctatagaaattccaataaaaatagcccctaaaatacctaatgcatcatgtaattctcccacaaaagaacttattactgctgctcctatgagaattaatatcataggttctgtcaaactttctcccaactcgtcccaaaatgttctaccttcttttatagtaaattcatttaatccatatctaagcttcctttcttctacttcattatcatcaagtccaatttctggatttgtttttaagtattttaatacttctttggtaggtttattataatacctcataactttatcccccttgttaattatctataaggaattatatgcttatgatagcttgtatattacttttcaaaaaaaataaggtgttgattaatcaacaccttatagtggttatatattattaaattttatgttacaggctttataaattgtgagctatacaaatcaaaatatttaatcttcaaaatacccttctggatataatgggaacttagatataagttcttgtgcctctgctttacattcatctaatacttctttattatcaatattttctgctaccttattcattattcctgctatctgtataacttctttttctttcagacctctttgagatattgatgtaagacctatacgaacaccactagttacaaatggtgattgtgggtcgtcaggtataacatttttattaactgttattcctacatattcaagagctttttcaaattgttttcctgtaagattcttacttcttaagtcaaccattactatatgattatcagtacctccacttacaatactaaaaccatgtgaaatcagttcagaagctagagtctgagcatttactacaacttgctccattatctttttaaatttatctgtacttaaatataatagtgaaaaggcttttgctgcaactgtattaagatgtatagaccctaatgttcctggaaaaacacctttatcgagtttctttgcatgttctgctttacaaagtacaataccacttcttggtccacagaaagtctttgtcgtagatgaagaaacaaaatctgcataaggtacaggactaggtattactttcgctgcgactaatcctgcaacatgtgccatatctaccataaagtaagctcctacttcttttgcaacctttgatattctttcataatctattaatcttggatatgaacttgcccctgcaattataagttttggtctacattcttttgcctttgcttcaagagcatcataatctatacgtccagtatttgggtctaccccataaaattcatatttataaatgtcatgtaaaaaattaactgcgctaccatgtgtcaagtgtccaccttggtcaagacgcatacttaaaacagtgtcatttggttttaatattgatgaatatacacaatagttagctgtagaacctgaatacggttgtacgtttacatgttctgctccaaatacttcttttgcacgttttattgctagggtttcaagtttatctgcttcttcagaacctgcttgaaaacgagcccctggatagccttcttctgttttatttgtaaatacacatccacttaattcaagtacttctgttggtgctgtactttcagaagctatcatctcaatattgtgttcttgtctaaccaactcatcagctacaatcttgtataactctgggtctgaaatttttgttgtttttaacataataatcctcctcttaattaaagaatatattttattagtttaatcttcattgataaatttattataatggtctataaaacgtaagatattcctccaccaggtcctaatggtatgccaatacccatgaatagtaacaatattattatttctattaatgtaaataccactgagtatggaatcatattcgatatgacagtacctatacctatatctttatcatatcttctggcaaaggccaatataactggaaaatacggaaaaagtggacttattggatttgttgaagcatctccaatacgataagctatttgagttaatgctggattaaagtctagtagcataaacatgggaacaaatataggtgctaaaatcgcccattttgcagaagcacttcctacaaataaattgataaatccagatagcaatataaatcctattatcaatccatagctaggtatccccgactctgctagtaattttgctcctgttattgataaaattgttcctaagttactaagattaaataaattaataaactgggatgctataaatgctaggactatatatccacccatatcactcatactactacccatcatagatactaaatctttgtcactttttatcttcttacttacttttccatacactaatcctggagttaaaaatataatagtgattataggaactatacctttcattaaaggtgcattactagatagtatagaaccagtctctggatctttcataaatgcattgtcacctatacataaggcaactatcactactactacaactaacaatgataataaagcgtattttatacccttattttcaagttcactcaattcctgtatatccttatcatttgttgaatcattatattttgtaaaacgaggagctataaatttttcagttacaaatgctcctgcaaaagttaaaactatcgctgatataaaagcaaaataaagattcattgctggattgccttggtaagatgggtccatcatttgagctgctggtattgtaaatccagctaacaatacatctgtagtactaagcataacatttgctgcaaatccccctgcaacacctgcaaaagctgcaaacatacctacaagaggatgtcttccaattcctaaaaacacaagtgctgcaagtggtggtaatattataaatcctacatctgctgctgtatgtgataacatacctgcaaatacgattgctacagttacaagtttttgtggaactttacttataccctttttcattaacacttccataaatccagatttctcagcaacacctgctccaagcattgtaaccagtactaatcctaaaggagcaaatgactggaagtttgtaactatgctacctaaatatgattgaatctgctctttctctagtagatttactacctttacaacttcttttgtagaaggatgtatttcttctactcctaaattagatataactgctgacaatattacaacaattatacatagtaataaaaatatggttactgggtctggaagtttatttcctgctctctctacaacatttagtgccctcatcaataatccactatctttgtttttttcctgtgaattaattttcctcaaactaataccccctcataaactttatctccagaatgctctatcttaaattttattttttaatttatccatataatttataacagactgacatagtacatttgtacctaccaatatagaatttttatcagctttaaatttaggattatgccactgatatatacaatcttgttctttattgcctacccctaaccagtaaaaaaatcctggggccttttccataaatatagaaaaatcttctcctcctgtagaaggtattggatcaactatagcatcttctgaatacaaatcacacacagacttacaagctattgtgtacatctctttactatttataacagctggtaaatcaaataaataatctagctttgcagttgcttgatatccacgagctatctcacaaactatattttctaaattttctgatattttctttcgtacttcattactaaagcttctacatgtacctgtcatatctaccttttctgaaattacattatttgcagtccctccatttatagtacctattgatataacagctgattctaatggacttatgtttctgcttactatggtttgaatacccattataattgcacttgatgctactatagggtctattgttctgtttggtatacctccgtgacctccaaatccatttacttctatcttaatagtgtctactgctgccattaacccacctaacttaacacctatttttccacaaggtatatctggatgattatgaagtccaaatatagcatcaacttttggattttccattactcctcgttccactagcatcttcgcacctttattgacttcttcggctggttgaaatataaactttacatttccatgaagactatctctaatatgagacaatacatatgcacatcctacaaggcaagatgtgtgtatatcatgcccacatgcatgcattataccatcatatctggatttatactcaatatcaacctcttcatatattggcaatgcatcaatatctcctctcagtgctactgtgggaccatcatacttcccttttaataatccaacaactcctgtttccattcctaaatctaatatttctatgtctaaacttactaataaatcttttatagcttttgtagtcctaaattctttaaaacttaattcggggtgcatatgaatatctgtaaaaaaatctaaaatatcttctttatacttttctgagattaaaataagttcatgcatactaacacctctccaaaattttatttttttattttttataatttaactacaaattatataagttaataatctttataaagatattttttataaatttaattttagtttatatttatattttactatattattttaattaaatatattatcatgttttgcaatttatttaactattttgactttttaaattcggattatataaaaaatttctttaaataaaaactattaataggtgactctattcctgactttgtgttgatttttttctacatgtaattgctttatacaccatacagactaaaattaaaagccccatataacctgtatatggatataaaatgtttactaatttaccaaacggtaaaaaaccacctatacaagccaaaatagctattactgttgttaccaatttaaatttaggatgttcatcttcaacaattctattggttacagaccataaaagtggaacagctgttgtatagatacctaatattaatgcaactgaaaaacatacacctacaataggagatatattatctgctaaataaagtgatggtatttctttcatatacaaatttcctatatctgaaatcatagccaaatacataactataccagcagtcataaacactattccacctaataaacctccccaaaaagcatcctttttactttcaatagaagctcccattcctgttaaaaaaacaatcattacaataatatttaatgtattatatattacaccagaaacgattggactttctgatgcttttgtaacttcaatatttttcatagcttctccaaccatagataaaccatcaaaatgcttaaacaagcttattaatccaacagcaattgtaaatactgctatcactggtccaatacgtccaagtatgcttactaatttttctaaacccatagacactgtaattaaagtagcaacagccatcaatactcttcctaagtaaggatttataccatagtattcagttaaagttgagcctgcacctgaaatcattactataagaatcccaaataaaaatattggactaaaccattcgtaaaattttcctaaaatcttcccacaataaaaagtgtaaattcttgttggttctttaagttttaattctctacctctagttataacttcagcaccaagaaatgaaaacaataccattgatattaatgctccaattaaacccatatacccttgtgaggcaaaaaattgtagaatttcttgaccagtagcaaacccagaaccaattgctgttgctagataagcgcctgcaatacagataatatttttcatattcactttgtctgacatattaaattacctccattataaagttaccttcctttaagaaatataaactctcagtgaattaaatgaaaattctgtctttttgaaacagtatttaattcactttttttattttgtatatctttttctttttatttatatatatttttttatataaataggtacagcttttataaggtttaatattattaaatatgtttaaagcgctttaatttttatcataattaaagtatacttattcagacacactcaaacaattatctatattgactttttatttatcaatttcaatttttagtgttcagtttataaacttttggagtcattcctttttctatcttaaagtttttataaaagttatttaggctattatatccaactatttctgcaatctcatttatactttttgtagtattttcaagtaattcaatagatttttctattcttatatgatttagatatgatataaaagttgtatttaaattacttttaaaaatcctagatatattagatggattggttaaaaataatctagcacaatcatttaactttaagtcattgctatagtttagatttatatattccagtatctcatttaataaatcattattggtatattgatatccaataattttttctacagacttagtaaattctttcatatccaatggtttaaggagtatatcttttacatttaatctcaaagctttttgagcatattcaaaatagttaaatgcagttattactacaaagtttatttttttagataaatgagatgttttttctattacttctaacccattgtatattggcatttgaatatctataaaaactatgtctggctctaaaccaatgattttatctactgcttcatcaccagatgttgctttaccaacaatttttattggcatatctttcatttctataaaatgtgttattatttttagaacagcttcttcatcatctattattagtgctcttctcatgagaatacctcccttttagcttaataatataaaaaagtaagatatataaaacaacataaaaacatctaatatatttcttaacatttataaaacttattaatttttcacaagttctatacatactccttataattttcaataggaattttaatcattatgtaagttccttcattatcactcgactttatatccatatcaaaattatttccataagcagatgtgaattttgtatatattaaagacaaaccatgaccattattactacgaatacctgcctttattttgtctatattatttccatctaagatagttccattattatgaatctctataatagcatactgagaatctaatcttgcaattatttcaattcgcttttctgtgtcaatatctctaaatccatgtgtaaatgcattctctacgataggttgaataaagttaaaaggcacagaaaggttatataacttctctggaataagatattttactttaagtgcatctccataacgtaatttctgtaaattcaaataatttttaatgtataatatttcagattctaattctacaaatcttaaatcagacctcattgtatatctaaacattcttgataaatctattattgcactatacaaatcataactaccatcatctagtgctatgcttgccattgaatttaatgtattaaataaaaagtgatgatttattcttaaattagtaaccatatcttgagctacttttaaattcatttcaagttgctctccataatgatatgttcttgctatagtcttctctttttcttgtaaatcctttcttatatcattaaaagagcaaaaatttattatatttttagatatttgtttcaagaggcgttttatacttctagcagctccctctggaatatcatataaattattatgctctgtatctaaatttaaatcagataatagtacataccctcctcttataacacctatgctattgcttttgtacagtattggtatattatatatagttatcccatattcacatacaaattgattgctacttttttgattcatacaatcacaattttgaggaaatttcataggattacatttttcaaaacaaaaaagtggaaaataagggttttttaaaactatattccatgaatcatcatatataattaatggaattttaaacgggtctataaattgaccacgaattgattctactgctgcatacaaatttaatgtactttcactataatttatcaaggtcttctttaaataattattaggattaatatctataacttcactctctcctacatcatctacattatttgaaacaataagttcttttatttctctatcgcctgtatttatagtttcatgtgtgctaccagattctatataaaaaatcataccttgataaaatggcttccaaactccatttataatatacaaaccctctccctctaaaatatatatcatctgctcttgaccataatgaacatgattaaaatgtttcttaccaggcatagttactgcaatgtatatattcatagcttgttttggattattttcatcataagtatgtttccattcaatatatccccactcagtattttgaattttcataaaagattcctttcctgtaaattatttatgttcatattgtgaaaaattagtaaaaaaaatgtgtacatactctttcatatgatagcttactatatcaatattcattagtttgtacacatttttatattaattatttttttttattacttctattattattgtatcacttttatattaactatttttttattacttctatattattgtatcacttttatattaactattttttattacttctatattattgtatcacttttatattaactatttttttattacttctatattattgtatcacttttatattaattattttttattacttctatattattgtattgcttaaaaatacataatttaactcttatttaataacagaaactcccatatatggtcttaaaacttcaggaacaaccacagaaccatcttcttgttgataattttctaatatagctgcaacacttcttccaatagctaacccagagccatttaatgtgtgtacatattcagctttagaatctttatctcttttaaatcttattcctgctcttctagcttggaaatcttcgcagtttgaacaagatgaaatctcaacatacctattgtaacttggcatccaaacttctacatcatatttaaaagaagccgtaaatcctaaatcacctgtacatatctttactactctataaggcagattcaataattgtagcatagtttccgcattgttagtaagcttttctaactcattgtaagattcttctggtgcaactattttaaccatttctactttgttaaactgatgctgtcttactaaacctcttgtatctcttccagcagaaccagcttctgacctaaaacatggagtataagctgtataatttattggtaattgttcaaatttaagtatttcattagcatgtatattagttaaaggaacttctgatgttggaatcataaaatagtccagaccttctattttaaacatatcttcttcaaacttaggtaactgtcctgtacctaaaaaactatttctatttgccataaatggtggaatgacttctgtatatccatttacttttgtattcgtgtctaagtaaaaatttaataatgctctctctaatctagcacccaatcctttgtaaagagtgaatcttgaaccagttattttactcgctgtttcaaaatcaagtatacctaattctgttccaatttcccaatgagccttagattcaaaatcaaaggtagtagtctttccccaagttcttacctcaacattatcttcatcagtttcaccttgtggtacttctggatgtggtacatttggtattctcattaataggtattccatcttatcttctacttctttaagattttggtctattaccttaattttatcagataactcttttagtttaatcttttcattttctacatctttaccttcttttataagatttggtatatttttagatgctgtatttaatttatgtttcataacttcaacttcttgaagaatctttcttctttcatcatctaacttaactacttcatcaaggttaaagtctttttcgccccttctttccattgctttttttatacaatctaaattttctcttattctttttatatcaagcattttttcctcctcagtacctaagattggatttatctcttaatctcaaataacttagataatatactttatgcttgaggttaagaaacctttttctttatccgaacctgttatttttattttatttatattttactcacttttttgtccattgtcaaattatatttaattaaataaatgaaatttaattttaggagaatattgctagatttaacttcattataattatatctattttgctaatcaattatctattttgactttttctttatcaatcttgtatagttattaacttttatataaatttttttatattataacatagtcctatatatctattatttggatagaattattttttaaattagaattattttaatgaatgcttcaagtaataggtatgaaattgaatcttttagaactgcttataaaaaatactcaaagaaaaatagtaattttctcagattcacaatatattttatatgaaatgttataaggtaatctatttaataaatttaaatttgctattatagatttagttccaaagtcttactgcaaagtaatatacatagttttttaataaactaataagtgcaattaataactacttaattgtttaatatagtacatagataactttaataaatcgacagttatttaaaaaggtagaatcaataaaattatacttataaatcttcaatacaataattaaaatttaataaaaaatataattgttgatttaactgtaatcttatttaattctacctaacttattatataaaactattttttatagattataaaatatctaactttcatctacttcaaagaatacaatacttctccttctcttatagtctgcaatactttaatatcttttattttcatagggtcgattgtaagtgggttttcatctaatattatcaaattagctaatttaccttctttaattgaaccttttttatcttcttcaaaatattgatatgctgcatttatagtaacaccctttaaagcatctaatgggcttatcttttcattctctcctatttgtatacctttttttgtaattctatttacagcacaccatactgtttccagcatattaggtgctattactggtgtatcctgatgaagagtgtaaattaatcccttttctatagttgttttaagtgggctaatcttaaacgctctatcttctccaaggtttttgatatgaatatcaccccaataatatgtgtgagctacaaagtatgaaggtatcatatttattactttcatatcatcaatctggtctgctcttactgtttgagcatgtatcataactggtcttatattattttcactactttgctcttttaagtttaaaactttctcaaacgcatctatcaactggtctgctgctgcatctccattacaatgagttaagagttgcatcttttcttttagtgaaatatctataaacttttctacttcttcatctttgtatataggatatccacaataaccatcatctgaattttcatatggtctactcaaccatgctgtcttaccttgtggagaaccatctaagaaaatcttataacctcctactttaaatctatttatatatttttttataaactccctattattatctaatacagacttactttttttcaaatttacatatcctacaacatccatttttaatttattttgatttgccattgcttttaaaatgttaaattgattttcttccattaaaccttcttgagctgttgtaataccatagcttagatatatgttctgtgctttttcaattgaattaaaaatctcatttgatgatggttgttttattttagatgctacattaaaaaatgcattttcttctaaatatccatttggttcttcactgccttctactctacctatatgtccaccttctgggtcacgtgtttcattggtaacaccaagctgttttaaccccaatgtatttgcagctcccatatgaccagaagcatgtgaaattagtattggattttctgaagatgcactatcgagtacactcttatctggatgcttattttcttctaaaaaattattatcatatgaaaatccaattatccagtctcctttttttatattattcgactctttgaaatcctgtattttttttactatgtctttaaaactggttgcatcttctaaaggaactagctttagagtagtagcaaaagctatcaagtgactatgtgaatctataaaagatggcatcaatgtcttaccttgtaaatctataatttctgtatctttatttttcaaagcaaatacttcttcttttgttcctatcttttttattattttatcttttataagaatagcatctccacatattgaatcttccattgtgatgatatttccattgtaataaattttttctttcataaaattctccttacgttgtctactttaataaatttttttcattattttctgcttaattatattatcttctttataaactttttctttagagtttaatcatataaaagttttatttttaattattgtttgccaagaagtaaatactattcattgtaaataagacaaattaataggctttatactaattgaaaaaatattataagttgttaaatttaaatatctaaactcaattatatctgtacaattgtaattttttaaatcatgatgtattattttaaatatacagttacattattattcacaatataagtatcttagttctcaaataacatctcatgtaatctattcaatgcaaaaaatttaaatattttttaggaggttttttatgagcaaggaaaataaaaatgtaagaattgctgttgtccaggcgtcaccagtcataatggatttagaaaaaactgttgaaaaagcattaggattaattaaagaagctggtagaaaaggggcaaatatcgtagttttccctgaagcattcatacctgcatatccaagaggtctttcatttggatttgttgttggaagtagaacaatggaaggtagagaagattggaaaagatactatgataattctgtaccagttcctagtgctacaacagatttattaggaaaagcagcacaagaagcaggagtatatctatcaatgggtataacagaaagagatggtaatgatataaattgtaccctttattgcacaaacttatttttctctccagaaggtaagctaattggtaaacacagaaaacttaaacctacaggaacagaaagatgtatttggggagaaggagatggaagtactcttacagtagttgatactccatatggaaaaatgggttcgttgatttgttgggaaaattatatgccattagctagaacagttctttatgctaagggtgtaaaactttacatagcccctactgcagattcaagagaagagtggcaagcaactatgaagcatattgctttagaaggaagatgttttgtaattggatgcaatcaatatgttgaaaaaaatatgtatccaactgaccttaactactataaggagctagatgcagaaccagaaattatgtgtccaggaggaagttgtatagttgacccttttggaaaatatgtagcaggtcctattttcaataaagaagaaatgctaatagctgatttagacctagaaaaaatagtacttagtagactagattttgattcagaaggtcactattcaagaccagatgtatttgaattaattgttcatgaataatctttttacacaaacatctacataaatttttttacataaaaaaatgagatactcataagtaaatttcaagtatctcatttttgcttaaaacctataatcctaattataaatttattcgcctatattttttctaaatcaactactgttcttccaacatgttttcctgtcattatcgaatctatactatcatttaactcttccaatgatactacatttaccatatcatctaaatcatctaatttccattcatttgataataaatcccatatttttaatcttaagttcattgggcaatccacagaatctataccatataaagtaattccctttaagataaatggatatactgaacttgtaaaatcaactcctcctgcattaccacaagttgttactgctccacaataattagttgtctttattgctgttgctagagtatttcctcctactgtatctattactccagcccatcttggtctaagcagaggtcttcctgagttatcatccacttctgacctatgtataacatctttaacacctaagtttagtaatacttctttttgttcttctaattttcctgttgaaactacaactgaataacctaatttaatcaatattttagttgcaattacagcaactcctccagtaccaccagtgactaatacatctcccatattcttgtctacagaatctataaatttatacacagataaagctgctgtaaaccctgctgtaccataatccattgcttcttttagtgaaagatttttaggaagtttaactacccaactagaaggaactcttatgtattctgaaaaaccaccagaagtattcattcccaagtcataacctgttactaaaacttcttctccaattttaaaatcatcacaactactagattctactataccagatgcatcaattcctggtgtatgaggatactttctcgtaacacccttattaccatttgcagaaagtgcatccttgtaatttagagaagaatattttacttttattagaacttcgccttctggcaatgtatctacttctctttcaactatatttcttctaaaatttccttcttcttctgtaatatatagtgatttaaattttttattcataaatttcctcccaatacatttagttttatgttaaactaattatagtttataaatagttttatgtcaaactaatttaaatagattaaagattggagaataatttatggaagataaatatattgtacatttcataagtaaaacaaaggctagtatgattaaattcattgaaaataaactcagtaaaaatggtttaggtgagttaatacctactcatggaaatattttaactgcactttatgaaaataatggaatacttacaatgaaagaaattgcagctaaaataggaaaagataaatccactgttacagtgttggttaataaacttataaacctaggatatttagaaagacaaaaatgtacaaatgacaaacgtatcacgtatataaagcttacaaaaaaggcactgcttatagaagatacttttaatagcatctcaacacaagttaaagagacagcataccataatattacagaaaatgaaaaacaagaatttcttagaattttaaaaaaaattaatgataattttaaaaatgctgactaaattgagcataattatatctcctattggaataataaataaaaagaatcaaatattgtaaaaatttattatgatagagaggtagaatatgaatttaaaagatagtaaaactaaagaaaatttattaagagcttttgcaggtgagagtcaagctagaaatagatacaatatttctgcatctgtagcaaaaaaagaaggattatatataatagagtctttatttaattacactgctgaccaagaaaaatcacatgcaaaacaattcttttctaaattaaaagaatttgctggtgaaaatataagtatatcaggagcataccctgtagatttatatgacaagacagcacaacaccttaaagctgcacaacataatgagcttcaagagtgggatgatgtatataaaaactttggaaaaacagcacgtgaagaaggatttgaatctatagctaagttatttgaaaatatagctgaaatagaaaaagttcatggtgatagatttggtagatatgctactgatttagaagaaggtactttattcagaagaaatgaagatatacaatggatatgtacacattgtggccatatacatataggtaaagaagctccaaaagcttgtcctgtatgtcttcatccacaaggatatttcttagattttaaaaactcattatttgaataaactaaggcaataattctatttaaacaatttactatatttatatcaagtatttttataaatactgtattatcttaataacaataaaatgaaccattgatattactataagtagaaaatgtagtttaaatacaatttatagtaattcatcatggttcattttattatttactaatccctataacctacttaaatctatctttaacttttacatactcacataaaatcttatctttaaactaaatatttaaataaagtgtattttaagtagattattataatacattatataagataatacactatgataactttatacttatatcatttatttcttttgtcaagtcaatctcaataatcttaactacatctttttcaaactttacttttttataatccagacatcctactacgaatggaactccaaactttctaaacaaataaatctttccactttcattgtatattgatgtaaaattttcttctattatattcactatcaattttaactcttcaaaagttattatagatttaactaaaaacttctctattatgctcaatataagcagttcttttttacctatgctttgctcttttttatataaattttgaaatatttctttggtataattacatataacttctttactgagaataaaatcaatgtcaaattccttattaatatcctttttcataaacatatttgcaatatcatcaagagaagtctcttctttcatagacaatattaactctattctttctagtattttatctcttggaaagaaagtctcttgacctgtaaaagctgatttttttataaaccattcctctggtattatgttttttcttttccatctatataattgaccataagatatattagttttgctcaataaatctttcttagatattaattcttccataacttttctagcccacctttatactgttttttacagtagaattatctgaaactgataaattatcactgtattcaatatttccaacgtcacaattatctactagagatatgcttttgcctcgtatatcttttattgatgcatcttctaattcaatagtatctccctctatcaaattacatttaaactttcctgaaaaaatattaatgattttaattaatgaaaaagcatctttgcttcttcctatttttatattagttgcccctatctctttacaataagaacctcctcctgaataaacatatatattttctccatttaaaagaccatcacattttattactccatatacctttatatcttcacattctatatttgatttatttctcatttcgccatagatttttatatcttgtgcatacatattttcatttacacttaattgtcctcttattgtaacattattacatttaagtttgccatccactttctgttgagcagttataactaagtcatctatttctgcatctccctctatattaagttgaccattcactcttacacgctctgctttaagattgcctcttataatagtttttccgttaacaacaaaattttttatattgatgtcaccttcaaattttgcatctccaaggacttttacttcgttacttttaacatttccttttgatttagaacttcccacgatttttatattttcatactcaccactacttataaagccttctccaagtatttttatagaccctttttccatattattacctcattttaaattttatttttaaacctatttattacttatccttctttaattttattttttcacttatattctttatttcaccaactattgaatcttcatcaatctctatactttcactgtactccaaactttctacataacatcccttgcctattttaatattttttcctcttacaactttgacttcactattttctaagcttatttcatctgcttctataatatttgcaaacaatttactttctgtatactttctaattgataatagacctaaacttattaaatttgaagacactttttcaaagttgatatgctttttttctagcatacgaaattttttgcaataatctccatgccccttttttatatttatactacttgctccaacttcattaaaattagaagttccatttaaactaatattaacttcttcacaattcaaaaatccattacactccaagattccacttaaattgatattttcacaatctatattctcatttgcttttaaatatccttctccatgaataatatccgattttatacttccttctacattaataattccactagtatcaatttcaacagaattaatatttcctgtacatctaagaagtcccgatatctcaacttttgatgccagtatgtttccttctactttacttaaaccagatgtaaaaaattcattacattctgttgtcccaaaaacttttgctgaaccagaagaatcaaatttactacattttacacttccttctattttgcctgttcctgatatattaacattatcaaaaattccacctttacattttccaacaccatcaaatcttagtgaacttaattcttcattcataatgatatcctttctttaccgtattttatctttaaacctaatataacaaaacattgttacgttgtcaagtctgataataatacttaataaagcaactatcatttattttctataaataggcataaaaataatagggaaatgctttatttaaactagaaatctaatttcttagattgtggtttaaataaaatatatccctattactcaatctttatatattcattgtataaacttctaaaatataagtctttaaattctactgtcaatactttttatacactgtttgtgctatcatttcacacctaaaggagtaggctctccgcactattctgtaacctaaaagacactatcttcttctatctattgataaatttttctattacatcagctagtctctccatatcagttggataaacttcacctatgctacctattctaaatgtatctatatcagtcaatttacctggatagataacaaatccattatcttttaaataagtataaaattccataaattcaaactttgcatttttaggatataagaaagttgttattacaggtgattgagcattatcattcaccaaagtatcaaatcctaaagattttaatcttgaagctattgtaaactgattttctttatatctagcatatcttttttcaacagaaccttcttcttccaattctaataaagcttgataaaaagctcttacaacatgtgtaggtgaagtaaatctccatttaccattatttttctccatagtctcccattgcgcatacacatcaagagataatgatttagctatacctttacatttagataatttctctttattagctattataaaaccaaatccaggtactccttgtatacatttgttagaactactaactaaaaaatctatattaaaatcttcaacatcaatctcaattcccccaaaactactcatagcatcaactatataaattttgttatattcttttgcaagtttccctacctcttgtataggatttaatctacctgtagtagtttcacagtgaaccattgatatatgtgttatatccttgttttcttttaataaattttctactacatttaaatccactgcttctatatctttaaatgtgcagtcaacaaattctatgttaagataattacatatatctttcattctctttccatatgctccatttgcaattacaagaagtttaccatcttttgaaatagtacttcctattatagcttctactgaaaaagtcccacttccttgcattaatacacttgtgtatttatctgtattttgggttgctagagatactaatcttcttctaacatcttgtactaggttattatattcaacatcccaagtacaccaatcttttaacatagatgctcttactgatttagtagtagatagtggtcctggtgtaagtaatatgtaatcattttctggtacaaaatctgatttaatagtttcattctctatttttattagtatatcttctaactcagccatagtttctattacaaaatgtgcacctgcctctttaaatttctttgaaactatactcatcttagcttttaattcttccttatccatgttctctacttcttcttgtgtaagccctaactcacttgaaccttttattacagcaacactccacattcctgcatttacgccttcttttacatcacttattgtatctcctacttttaccatagaactcataggagacacccctaaagcttcagcatttttatagcacatccaaggatacggtcttccttgagatacttctgatggtgttacaagaaaatcgggtgagtatcctttctttgctgcatttggttcaactatgttcatcatctctcttgtataacccgttgtagaacctatttttaatccattttttctcaacttttcaatagtttcaacaacatgaggaattggagtcgtatactcttctaatgtctcaaataacattggctcaaattcagcataaagttcatttacatcatcttcagttggcactttaccaaacttatctgaccaaagattttttattctatccatttcacacatttctcttatatggtctatttttaattttcccataggttttcttgcttcttccattgttacatctatacctcttcttttaaatatctctataaatacattaagaggtgcaaaacatccataatctactgttgttccagcccaatcgaatactactgcttttattttttctccatatatctttttcatatttatagcctccatagattcattttagaatttttgtgtttttaattgtttttacttttaaagtataactttcatatgttaattatacatcatatttaggttaaatatatattaaatttctgtttttagttgtatttaattgtttttattttatatcatatttccataaaatcctaagttacaatctaaaatttactttctaatcttaatctatgaactgactatattttatgaatttagttgtattaagcatagttgtattatataaaactaagggtttattttgcttctatccatgttatatttatctcatttaacttatccttccattcattcggaggttctacatcacaaataacaaaatctaattcctctaaatctgctatcttatacatactagcaattcctattttagaactatcacataatacaaaactttcctttgaattttttatatattcttttgacaacaatgccttattttggtctatactactaattccaaaactatcaagtataccttcactagatataaaagctttatctacgtataagtttttcatagtgtctattgacattggacatgctgtcctttggtgttttaaatttacttttccaccaataaatataacttctccatcaaacaaaccttgattctcataagaaatcaattttgatagaactggataagagtttgtaataatttttaaattgtttacagatattatataatctacaatctgcaaattggtagtaccttcatctatgataattgactcattgtcatttacaaacttagctgcgtatttagcaatactttgttttttatctaggttagtattgtttctctttatatgttctggttcaatcactccataatttatttttatagcaccaccatataccttttttaatttattttcattttctaattcttccaaatatcttcttattgtttctgatgatacttctaatctttttactaattctttagtatttaccttcccttttgaatctaataatttaagtatttctttttttctatctatcgaatttaaagacattcattttcctcctaaatataatatatttttctcctataatattacaatgatacctaagatttatgaaatcatatttatgtattaaattttttacttaattaaagttattttcaaaagactttgtattatcattaaaaaagtccatcaaatattagtatcagatggactttgtaaaattttattttataaattaatatttaaagtctaactactaatttattttcttgtctccaagaattttactaaattatttacagtagacatatcttttctctctaaatcagttggttgaagctctatccctaatctattttcaatttcaagtaaaacttcaattatagctaatgagtctaaaagttccgtctcaaataaattaaggtctaaatcttctcttatctcatcagtccctaatacatcttcaaatatttctataactgtttcttgcataaattttcctccttaaaattaagctaaataacctgagaatatcagcaatccaaaacacacaatatggaatgtaatgaaaatctgcactctctcgaaccatttatcttttttatgttttttataaaatttagattttcgctgatatatatcagttaacacaagtgccaatccttggtatacaccataagcaacataataccaagttagaccatgccaaaatcccattgttatcatggttatcatctgagccacatgagcagcagtagtccttttcttaaatcttttctttctcattgatgacataacaaatctagaaaaaatataatctccaaaccatcttgaaagacttatatgccatcttgtccagaactctttcatatctttactgataaatggcttgtcaaagtttataggtacttgtattccaaatatgtaccctgtacctatagcaaataaactatatcctgcaaaatcaaagaacaggtataaactatatgcgtacatataacttaaaatatttataaaactcatatctttaggtattcttgatacccaatatgtatttatcaaaaatgctataacaaacttataacctactcccatgacaatattttttattcctggcagtaagtattcttctatatactcttttctagagatgtgtttttccaagtcctgttcaaatcttcttgacctatcaataggtccagaacttaaagttggaaaaaataacataaaataaagcatctttgaaattttaacttcttttatagctccatcataaatttcaataaccatttgtatagttctgaaatttaagtatgatattccaataaatccaattattccaaaagaagtaactggagatattttatttattattattgggagcattgatgcaaacaagaatccccaatatatgtatttatttttagtttttcttcttacatattcatatcctttaactattattacttcaagaataataaatattaccaaatactttagctggacatcaattcctactattaagaatatcataaacaaacttgccaacataccataatactttatattcttgcccattagacctaaaattactgctggtattgatgttaataataatatataaagataaaaataatctccatactgtgaaaaaatcattaaatttcctccataagtttctttctgtctattttaccattgatatttgttggaaactcagagattattgaaatatttcttggaatcatatatgaaggtatatactttccaagttccttttttattatcatcccatttttaatattacttaaatcattcttttcatttaactcaacaataccttttaagtaagcaattttttcgtccttatatactggtaaaactactgcattttttacattatgtacttttctcaaattattttctatatcttctatttcaattctaaatccatttaatttaatctgaaaatcttttcttccacaataatatatatttccatctaaaagatatcccatatctccagttttataagctctccactttacaccatctatttcatcatagaaaaatacttcatcagtcttttctttattattgaagtaacctttagaaactgatggtccaattattataatttcacccttttcattttctttaagttcatttccatcttcatcaagtatttttattttacaatttgacatagggtatccaactggaagacttttttcatcatctatagctttttgagtcatatcatttacacttacaccaacagtagcctcggttggtccatatccattgataattcttgtgtttggaaatctactcataagttctttagtaagattttttgaaagtgcttctcctatgaatatcattgactcaaggttaggaagcattttactattaaactctttttcagttatacatactcctgcaaaagaaggagttgacacccatacagctatatctgagatactaaattgtctaaatagttctttatagtctgctaatacatcttttgatattgaaaataatgtagctccatggataagaccagggtatattgttgtaactgaaaggtcaaaagaatatgctggttggttcattattactttttcacttccatctatgtttagatatgggcttatccaatctgaaaagctatctaaattgtttgaacttatttgaaccccttttggctttcctgtacttcctgaagtaaatagtatatatgcattttcatcatcttttacccagttttctttatctaatgattttccctgatattcatttattatatcatttaatttatccatatcaattacattgatatctccaaaatttctttcatcactaaaattaaatattacttttggttttatctctttagtgacttcaaaaactctatcaattggaaaactaatatcaagaggcacatacgctctacctgattttaaagctcctatcatacatgccattatcatgttttctttatttccataaattactataggagtatcctcttctttgtatacatcctttagaaatactgatatagcatctgaatattcatttaaatctttataagaaagtttatctccattacacattagtgctgttctatctgtatttgaatatttttttattccttcaataattttcatataagaatgctcctttaaaatccgttataaataaatggcaattctttaaatggagtaaatgttagaactcctatcgccaatattataaccatagttaaacaaatactagttaacaaatctttattgttctttaaatattttaaataatctctcacagacatctacccatcctttcgtaccaagatgcattacatcccttaaataatacttatctgaccctttatctttaaggtttagaacttcaaagcctttgctttctgctattttttgtgctttatcgtagtactgatttctttctttttcagaaataccagtcaaattatagaatttatccatacttgggattaatacaacaactggattaatacctaagtcagtacatacatttagcatcagtttataattttcaaactccttagatgttaataaatttacatctttgtctcttcctttgtattgctctataccatctttaaaatgctctttataatagtacttatcaatatttagtggatttttaccaactctttttttagcatcttcaatggctttctttctctcatatgaccaatttattggtctttttctttttgttgctctctttttatctagcttaattaatcgtttataaagaatacccttttctttaagagctatacagtactttcttccttgaaaataaggctctaaaagcaccttttcagctttttcaggaaatgtcttaggttcatatagcttagcatataatgcttctgctttatactcatcacttccccataatagcttacttgatttttttgcatattcaatcttattttgtttagatatttttggattatctaaaaatcgataaaattgtattggtgaaaatctagactgataatggtgacttgtgactccgtctttttccataaaccattgcatagaaattaacaagacaactttcttattatcaatattaggattcatacttcctaatattgcagcatcttgtaatgtctgagtataggctctcccaattgcaaacaccttatttttactcctatttgtattaaaatagtactttggatgttgttttgttgaattactaagttctgatgaccccaaaatcataatatccttttctcttaaaaaatgattatttgctgtaacccctttatcttttatatcacttaaagtatcatccataattggaagtagatttttctccctcaaaagttcatcagttttagaatcaagaaatttgtctaacccaaataaaaatactacgcctattataaaaggtgtaataaagtatatcaattttctcatattttctctcctctaaaaatattcaaatttatgttattattaatcatattagttttgatatgtatattcaactacaaaattgtaataaaatcgtcaaaactttttttgatactgttacaaaattgtaaaaaaaaaagaaaaaaacaccaaaaataaatttctttttagcactttttcatacttataatttgacattttaacacttggctaagtatacaccttaccttaacttaaaattaaatttatttaagaatatatattataaattcttatattttctaatataagctatatactatcagctggataaacaatactactttgtcttcttatctcatccataatttccattactattattgaattttcatgagaatttatatttgattctattttattgttatttataagacttataaactctacaagttcataatacattccttctatttctctaggcttttcctctgctttttcttttggaatagatatatcttcttctcttccatctctgtatttaataatagctttttcaaatagattaagcttttcaattattatacttccctcttctccttgtatttcagatggtatataagaatcagctactttagaatactgaattattgcatccatatcatcatattgaaatacagctgaaccttctccatccactccagtttgaagtatatgagaaactgcctttacagtttttggagcaccaaataaattcaccataggatgtatacaatacactcctatatccattaaagctccatttgacaactcttttttaaaggcattttctataattccatttttatatttatcatatcttgaagaatactgacaatagcttccaaaaaatcttcttattttccctattttatacaagttttctttaactgctttaaagtttggaacacatgtaattctcatagcttccataagcaatacattattatctttggctgtttttatcattgatttgacttcttttaaattagatgctaacgacttttcacaaagcacatgttttttgtgttttaaacaagtaatggcttgctttgaatgtaatgcatttggagaagctatatatacagcatctatatccttcgatttagccatttgttctaaatcatcaaaaaaaatacttgctccatgtagagttccaaattctctagctttttctaaatttctagaatatacagcaaccaattcaaaatctttaaccctagatgcagctcttagaaatatatttgctatattgcttgtcccaacaataccaaatcttattttacccatcataaatcactccccattttctacactttattttaattttaataaaaaactttacaacttatagatatattataaaataattttatcaaataaaaaagaaagctaattttaaatgatttcaccattttaacatagctttcttttaactacaatctaaattcaacttatatttttaaagttatctttctactatatctttatttcccctcaaaaattttatagtaagaatttcatccacaaacaatgttactaaaagtatagttacaagaattggccaataaggtattataagactatataaactatcaactatatacacttgaaaatatctaactccaataaatgtcaatatagtccaatatacagaaaactttagacatactattcctctactattgtacttataatctgaataatcccaatagaccttattaaaatatactttcataagtattcctgtaatatattctactactgtcggcactactagacataataaaagcaatgcaaatatattattggggtcaataaatcttgagacctctattataatcgacattgcaattgcatacattggtttaaatggaccatttaaaaatccatcttcttgaaaatgcccttgtttataataactatataagttttcaattatccaacctataaaaccatacaagaaaaaattaaataaaaaatataatagagaacctacattatccatgaatattcctcctagctgtttatacttattttttctcatattcatggatttattctaaatcaaagaaattatatttaatttatttaattaatactttatattatagattgtgacattctttagagttcaaactttttaggtattctctaacttccagtaaattttcaagtatcttatgtgattgtgatttaatttgctcatctggctcttttaaatctggtacatttatacatcttatcccaccattgtatgcagcttcaactcccataggcgaatcctctatgacaatacaattttggggattaacatttatctttttagctgcttttaagaatatctcagggtttggtttagagtttacaacatcatctccacaaactatagcatcaaagtaatcttttaaatttgccttagctaatctctttactgctctttctctctttgttgatgttgcaacagccattttgtatccattttcctttaaaaaagagattagttcattgactcctaatttgataggagctcccttcctctccataaattcaatcatatttttagttttttcgtcatataaatctattattggtacagaactatcgtatatatctgtaagaccttctattattcctttacgatttcttcccataactgatgtataaatttccttagtcatagtatatccatacttttcaaacgtctccatccaaaattcaagagaaattctctctgagtcaaacaaaactccatccatgtcaaaaataattccttctactttttgcatacaattcctccaatattttttgatataattatattacactttttatgattaattttacaaccctcaatttatccaattctaatattgtaaaattgtaattttcaaaagttacgctttggtttactttaatatttgaaccaagcatataggatatccacccacctatactgtcaaatccatcatgctctatatcaagtccaaaatacttattaatatagttgatagattcagttccatcaactaagtaagaacctgctcctattttcttaatatgagtctcttctttgtcaaattcatcttgaatttctccaactatctcttctagtatatcttctattgttaccacaccagatgtaccaccatattcatccacaactatagcaagttgaagtttttcctttcttattctctcaagagctttatctatagttaaattttcagatatatatataatatctctcaatatttcttctagttcaattttattttcatttatcttttgattgtataaatctcttatatgtacaaaacctaatatatcatctttattttttctgcatactggatatcttgtaacaccttcctcttttaaaatagctaatatcttttcttcagaatcactttcatatatacataccatatcagttctaggaaccattatctctctaattttcttttcttcaaattcaaaaatattatcaactaatctttgctctgattcatctataagtccacttttataactttcttctactaatagtcttatttcgtcacctgtatggggttcatcaacctcatcagcttgtgaatatccaaatggtttaagaaataaatcagtacttaagttgaaaaaatatattattggatatgttaacttataaaatcctactaataaaaaagatgtactcaacattattttttctgtattataaagtgctaaagctttaggaaccaactctcctattacaacctccatcattgttataattaaaaaagaaatggaaattgatatagtatatataatactttcactaagattaaatacacttactattggtaaaattaactctttaactgtagattctcccatccaacctaatgcaagtgaacaaagtgttataccaagttgacatgcagaaagataggaatttaagttgtcttttattattttacatctttttgcattattattaccttcagttatcatggtatcaatcctagaactacgaagttttaccatagcaaattcacaagctacaaaaaaagcatttatcaaaacaagcattactataagtgttacttttaataactcccgcataaagtattggttcttataatgtaagaaatctataagaactcaaagttccccccttatatttataaatttaatttataatatatattctatcatatttattaatatatcctactttattacaaataatttttataaactaaataacccctttaatatttatgactgtctatttgataaatattaaaggggttatttagttatcattttttatttctaaaaatcttttctcaaatgatttagttatctatttatccaattttttacataatttaatgattaaaaatattaattttttcactataaagtataaatattttttgtataaatattatctgattattaaaataaatattaatactataaataaaaacgaagcatgatttttatttaaataaatcccaaacttcgtctttacttacttagatatttatttactttctaaatcctattatttttaaaaccttatctttttaatacttcaccacatttattctcagtaatctctccattttctaacgcaatttttccatttacaattacatattcaacaccattggctagtaattgtggctttgaaaaatcaatatcttctgacctagaataactatagttatccatgtcaataactgctatatcagctatcaacccttctttaataatacctctattttttattttaaattgcctagctggtaatgaagtaactcttcttacaatctcttccaatctaacaccagactttctgtacatattgaagaaaattggaaaagctcctcttctttgtagttcaaaccatgacatatccccacccacactaaacaaacaatctgaaccaaccataacaaatggattatcaattattttattatcatgtagtttatctgggaaatcagctctatacattcctcctaaacaaaagataagttcttcgtctccatctaaaagtaaatcgagtaataacttgtcctcatctattcctttttgtgtagctatttcacgtattgatttcttttccatattaatatctttagtgtttagaagtattatactccccctatctccaagtataaatgcttcttttaatataagtgttcttccctcttcatttctaagatcatccattaccccatctatacctaattcaaatagactagatgatattgccataataaattgaattactctttttttcttcatacaatgcccagaacttcttggtactgtgtcaaccattatttcaacaccattatacctagcctttaatatctcatcaaatgcttctatttcaactggacttaagtgagatacttgaaccctagcaccacttttttgcccaacctctatggcttcttttactgcattatatcttcctatgtaatctctaatatgagatgtatatataccatcatgctctttaatctgccttgcaatatcaacaagttcatcaatatcagcatacttacttggtatatatgccaatccagtagatattccaaaagcaccacttttcattccatcatttattatatctgtaatttcatttttttccttttctgtaggaggtctatccttagaacctcccataacactccatcttatagtcccatgccccaacaagaatcccatattgacagaaataccacttttagatataaggtcacaatattctgtaaaattattccaacatttatttttatctataagatactttttttcttcttcaagtaatagaccatttttatacatatattcatatacattttcagaagaatatggtgttatagaatgtccacaattaccatttatagttgttgtaactccttgttttagaaacttttcaaatttaccatctagtattgctactatttcttcatgaacatgagggtcaataaatccaggtgttataacttttccacaacaatcaatctctttatttgtattgctatttatcttagaatctatttttgctattaagttgtctttaattgctatatctccataaaaaccaggattacctgtaccatctattataaatccattttttaagattaaatcatatatcaaaatattccctccttaaaaaccaatttttaaataatcttaatgtaatttttatatttgaaaatcaaattattatatttcatatttgaaaattcactattatttcattgtaattagtcactaagcttatctttatacatagctcttgcaattaatatagtaccaaatacacatataagaactactagagactgtggtattataccttgctttgataatataatagtcaatacagatattacaattgctactagacctaattttttatcttgtaaaaatacttgtccaaaaactgacccaaatagagctggtaaaattaagtttaatttttctactacttcagctggaattttagataatacgcttcctcctaaaattacccctatagttagtatacttatattcactaaaatagatacagctattcctattgtagatattatcgagccttcttctgtacctgattcaacttctgctgccttttgagctgctattgaacatggtagcctcatattagatatattaccagaaagaaaactcatataagttcctgggatacctaagattggtgaataagaaactggttctattatgtaatttggagcactcatactgacaattgccattgtacttgctaataatgctgatattggaggcataataccaaatccaaagctcaaaattattccaggaactaatgctgctataatacctaaagatagtgttagtcttccataccttatcataaaaggtaaatattcttcattgtatatagattttactttactcataaaactccccccttatattactgaagctattatcattccgctaaacattgatattgtaagcccccactctcttaaccattttatatttttcttcttttcaagcatacacaatattaccattatagccattccacttatacatgcaattgttccattatcaaaacgcaacaccctatcagcatttagatatgcaaatgaacccaacattgctcctagagatattattggtataaatgatttcttgccactagatataacattggttatcttatctagtttatgtccaaatagtaatgtgaatattatccatcctaaagaacctaatatcatagtccaaactgcatttgtaaatgcaagttttgtcatttcaggagaacctaaagttatacctaatgcatctgttccaaatccagctgacattgattcaaaaattacagaacctataaatgataatctcatccatgctataggcccacccatagttactataagcgataccattccagcaaatatagtcattgaaggcccaatagctgaaatagcactactcttaacagctgactttatttgtttatctgttattcccattgttttaccaactttgcaagattttatagcaaatataagggattgtaccactactattgatactgctactgtactcgctatccacaaaagtggatgattagctaattttaaataatccatttataaaacctccctataaatcctcaaattttattaatatttctaatatatctatttccaaacctgttttagtactctaagtatatttccacctagtaccttctctatttcctcatcactatatccatgctttactaaatatctgacaatgttttttgaagtttctgttgggttctcaagaccttttacatattctactttgggatgttcttttgtacctgttattttttttatatcaaatttagcagctagtactgagtgtaattttacatggtcgccatatactgtatctggtccaaaagctacatggtctattcctactaaatttttaatatactcaaaatgttccataaatgactctattgaatgttctttattcttctctgttattgtagtatgaggtgctgcttctacacctataacccctccttttttagcacatgctattaatacttcatctggagttagtctctttgtgttccataaatttcttgccccaacatggcttaatattattgggtccttgctatattctattacatcaagtgtagtttgaactccaacgtgagagcaatctattgccattccaattttattcattctttcaacagctttttttccgaaatttgtaagacctccatctttctcttcttttagtcctgaacctaatgcattggattcgctgtatgttatacccattaaccttataccaaatccatacagtatatctattctatcaagttcattttctattggtgctgcaccttctaatgttggtatcaatgctactttaccttcacttttagctctgcatatatcttctactttttcacactttatgacaaaatcttgatgagctaaatcacatagtctcatgcctaaatctattaatatatcatcccatttccaccctgaatttgatgttatcgtacatacaccatccattaaattatcaaatatagcatcataatatcctcttgataatgcttcataagcgcatctttgtttaccttccctattatattcaaatatatctctttctaggtgttctggaaataatactggatgttcatgtaatgatataaatattttttcatccactatacttttaaccttagcttcttgaatatcatctaattcaataaggtactctttaactcttttatctcctttacacatctcaatagatgaaatatcttttcctttttctaaataactataggcttcatatcctttgtaagctgacttcataacaacatcctccaagttctacaattttttatatttttcctatgtagcaattgatatgccaaaatataaattttaattgtataataaatcttgcaaaaaataaaaacagtagtaaggttgatatttactactgttttattaaaaataatcttcttagattatttattcaatatttttgaattatcttaatcttaaagataattttatttatttctatccattatagggatttttttagggtgttttgcctttttagtcccctatatcactcccttaatttttacatatgatataaagttctttccttcatcagttataaaactaccttgtttttttactccagataaaagtaaaccatggctctttaacttatctattctttttctaatttggtctacacttaaaactatatctttttcttttaaaatctcttgcagtttatttcttcctaataatatatttttattattccaagtttctatactgttcaatatacatatactttcctcaaagaaattagattgtttgaaatctaagataattgaatcgaaattttcattaactaaagtattgtttttttcaaatctaaattgttctggcaaatgctcgtaatctactctatcttcctcaactatagtatcaatataataaattaaatttttaagctctcttacatttcctggccattcatacaatgttaaagcttgcattgattcctctgtaaaacatttgttgctatttatttcatctaaaaaatacttacttataagaggtatatcttccttacgttctctaagtctaggtatctctatatgtaatacattaatcctataatacaaatcttctctaaaagaaccttctttaatttttttctttaaatctttatttgttgcagctataattctaacatctattggtataattttacttccgcccattctcataacttctttttcctgtaatactcttagcaatctctgctgtacatctaaagatatatcacctatctcatctaaaaaaattgttcctgtatgcgctctttcaaatatacccatttttccaccttttattgctcctgtaaaacttccttcatcatagccaaaaagttcactttcaataagtgtatctgacaaagaagatagattaactgcaacaaatggcttgttttttcttagagattcattatgtattgcctgggcaaatatttcttttcctgttccattttctccaagtatcaacacagaaaagtctgtagttgctatttttcttgcaatattaattttttcttttattattttactctcacctacaacactctcaaatgtatactttgatacaaaaccttttgactgaagtttattttgaatcttgtcctcaagcacttgaattgcacttatatttttaatgcttataatactctttattcgttcattattttcataaacatttactttattaattatcagttttttgttatttaaatttactacttcatcattaacttcatcttcttgaaaaaatatttttttgacaaccttatcactaaataagtccataaagttattagatataatttcattttggtctattccaactagattagaaaatactttgttgcaatatataaattttcctaatttatcaacagaggcaataccttcatctataatctccaaaaaactcttcatggttttattcatagttgtataatacctatatccacttactgtatcttcattgtatttttccttaataatatgtaatttatctatagatatatttagttttgtaaagatttctataactgtatttatatcaattaccttatcacctatgtcaattatttgctttatgttttgtggtatgctgtttctgcttcccgtaataattccaatctcacatttagacttatcacaacctggataatatggtattagattaatatgaattaatcctagttttctaattatcttggcagtttcatctgctgactctttataagcatctataaccataacatcagaatcattttctatacttattatctgatttatattttcaatatttatagtacgatgtactattacaataagtatatttttatcaatattattatgtatatattcctttatatcattgtctgaacatactacaagctcatagcttgacagttcaatatttatcctatttacatataccaagttatctatattacaaaattctccaaatatattttccaattgttttgatatatctatatttattttgtcatcagttgatacaaataaaatattatgttttttcatagtcccacctcctgtttaacgagtatagaaagtaataatttggtctattgtagcactttttaaaaaagttttaaatcttaaaaatcaaattttgtaccatttactattattttccataataaaataatgtaagctatcttttttcacatataatttaatttctaaaacggttagtttgacattattggaatataaacaaaaatttaatataaattcgttaatatattaatacatttttaagaatgacaaggaataaattataacaaattttaggaatatataataatagggtctcagaacttagttacaagttctaaaaccctatttgtttagtgtaaaaaacatcataaaatttagcttaaatcttttcacataatattactctttttctaagtgataataaaatatatctattcctctaaaaactgtaaaaattcctgattaaatagtttaagctcatcatagaatatagcatgaccactatactcaaaagtatataaaattgaatcttctattttttcattcataaaaactgcaaattcatacggacatatttcatctaatttcccatgaaatataccagtaggcactcttacacattttaaatcattaaataattcttcatctcttaaagatacagcagttccaatagtgccaatacctgatgcactaaaaccaatatcattaaaccatcttctaaagctttctggtggatttgatgcaaatactttttctccaaaatcggttaccatttctggtctatcagtacatgcttgtgctatcaatttatttacatcttcacgtgtcataccatatggaaattctggaggtctttgtacaaatgatggtgcagcagctgcagctaataccaattttgacactccatatccattaaataaactcatatacctaagtacgattgctcctcccattgaaaaaccaacaaaggtaaagtcttttaatccaatagcatgtaccaccttataaatatcgtctgctaattggctataagtatatcctcctgatgttgcatcagatttaccaaaacctcttaaatcaattgaaactgttctatatccgagttttggcaatatatttgtttgatattcaaatatcttatgtcctaagggccaaccatgtataaaaagtacagtttttttagcactcggattcaaatcatatactgctatgtttatatcattcacatatacataatacatatcaacagcaactcccttcaagaaaatgtatgatggttattttatatatatgaataaaatgatgaataactaaatttttaaatttatttacaatacttctctattgccttttcaaataaacttacatgaagtttttcatctaggattattctatttaatatagcttttatataagggtcttcaataagacttatatctttataataattattaatagccacatgctccaaatgcaaatctagttttaatctgttacaaatagaatttccataacatacaaaaccaccattccaatatgcaccacaagaacttgtagaacctctatatacaggatttccacccaataatcttatagtctttgctaatatctccatatgtaacatttctgttatagatatatttatccacatttcacttaactctctatgcgtttcatctaaatcaaaattatggtatagatattgatttacactcgtaaattcacttgatactccggcatagtcatccatcaataattctgcataatacttatttagacctaaaacttttatctctggatatggctcatcacttgaatatccatttcgcttgtgcatgtcgtaatgtgcatcactcataatatctcctcctttaaatttaatacttgatattaattgtatgcatcacgactttttcatataacttagataataaaatctattatattattttctattataatttatgtgtcaattcacccaaatttatttgatatgcaatatttctttccttagtgctacatatgtaataaaaacatatatacaatatattactacaaaattaataagcgtaatggctacagcatgtaagataggaatctgaatattaaaaaatactggagcatcaaaagaaatattaaacatgttgtatgaaaaaactgataccaatattccaccaaatattactgcaggaattaatggaatcgaaaaatataaacaaacatgtttctttaagatttttattacttcactatcaatcatccccaaagttcgaagcattccatagtgttttatgataatgttattttcgctcaataattgaatagagagaatgactgtaccaataatgcatataatgagtgccaaataaaaaagtggtaatatcaagataatggcttgaccagtagattgcatagcatactttccacttatataatccttattatcatatcgtaatttagaaacaaagccttgattacctgctactactactccagaattaagattttctaaagtatcaaactttttctgaaactcagtaaaataagcactatccaaaggctcacttgtaatagcaacataaagactatacagaggtttcatattatcaattaaataatctggaatgacaataatatattcttgtccatttccatatcctccatactgtgaaaagttctctatataaatacctgcaatacttaagtccttatctgatattgtcagtttatatttttctccaatataattcttatatgcatcagcaagataaggcatacaatggatgataaattgatttttgtccatctttattgggtttaaacccaacatatttcttagtatattgtaatcactatatttcataaatgtgtcaaactggttttctgcaaaagtataatccttatattgtaaatctcgccctatatctttcaagtatttagaaaggatattattacgaaccttcataaaggatgttttttcttctgtgtaaagagtataagaataatcctttttcacacctttcgtttctgataaatatccttcatatgaagaaaaatcatatgattcattcgggtgaaaaatactcacatcaaattgttgtaaatccactgatttattcatcacagaataaaatgagttagctattccaatacaagcaattgatactgtaaaaagagttgcgataatacccattataatgcttattccatttatctttgaagccagtagacgatacaaaaataagtgagatttcttatatttccaattcatccctttttcaaacatattctgtgcaatagatccaaatcccataaataatacgattagacaaaatacaatcaacaataaaccaagaaatacatctgttaatctaccactaggtattgaaaagaaaaaaatacccatacctccacacaaaacagacacacaaaacataatagacttcgtttttgtttggtgaattaatacattttcattatatcgatcataattaagcaaattaattaatttcattttaacaagttttttattactttttaattgagcaattaaatatattatgcagaagtataaaaaagtcatcccagcagcttttaatgaaaaatccggagataaagaatactttccatgaaacatattaataacaatagattccaaaaccttagaaacaaatatccctagaatccatccaacaataagagcagaagcacctaataaaagattctctataaaaagcattttaacaatttgttttttatctactcctaatatcatataagtacttatttctctgcttctttttttcaatataaaattcatcatataactaacaaaccagcctaaaataaaagtaataatgaacgaaaatatgataatcatataagaaaactcatcgcttcctccattattaagtatactagaaagttcttgcattacgtcggaaaatatcaaagcgttaaaagcataaatcaaagctacagagcctattaaggaacaccaataaataaggtactttcctgcttgtcgtcttgcattacgaaaagataatcctttcaacataatcaatctcctcccatcaaagaaagtgcatccaaaatttcgtgatagaaagtaagtctggatttttctccttttctaagttcgttaaaaattttcccatcccttagaaataaaattctctcagtataactagctgaaatagcgtcgtgtgtgacaagaagaatcgtagcctctaatatggtgtttatagtttccaaaagttccattaaagttttagatgaattagaatccaatgcaccagttggttcatctgccaaaataagtttgggctctgttacaactgcacgagctactgcacaacgttgcctctgaccaccagatacttcataaggaaacttcgaaagtatctcttcaattttcaattgtgtggcaatattatacacactattagtaatttcaacaggagaaactttttttattgtaagtggaagtgctatattttcttctaatgtcagagtatctaataaattagaatcctgaaaaacaaaacctaaattatcacgacgaaaaacagttaagttttcttcggatagttcagtaatatcttgattttcaagataaatttttccagcacttactgtatcaattgtagcaatacaatttaacaaagtagttttaccagagccagaagttcccataatactgacaaactctcctgtattaatttgaaatgacacatcattcaaggcctttgtaagtattttctgattgccataatatttctcaatgttctctactcgtaatagcatgttaaagtcctccttagtcaacaatttttccatttttaattattattgtcttatctgaaaaattcaagatatatacatatatgctttctttagagtcttgaatttgaatagtaggttcattagatgaaattagagatttttttacttcaatatcgtattttattgttaattcattatcatctccatttttattagtatcttctacatttttatttaaatcaatgttattatgattaaagggaccagtaaactttacttctgtaatagttccattttttctaataaaagaagcatattcagaccttagtggtatgatacttcgtgagaaaaaacccatcgaatccaatcctgtaattgaaataaacaaaacgagtacaacacataatatagttaatatcctttttttcatatgtttctccctcctttctattgatattgtagcgtaaatagtaatctgaatatatagaagttacttaactttatcttacagttttgaaagataaagaaatagcagcgcatttttagttgcactgcttctgcatattgatagctgtatttattgggaaattcaatgttattgctgtgtattcaccaaggctggaggacacatctatatcaattcccattttcttagacagttcataacaaaggtaaagaccaatccctgtagaattgtttgtagtccttccattactgccagtaaaacctaattcaaaaattcgataaatttcactttctttgatgccaataccattatcttttatagtaaacttaacactcttgtcttcttttattgcaaaaaatgaaatttcagctgaatcacttttgtactgaacactattgataataatttgatttaaaataaaaactatccactttttatcagtatatacactatactccaaatcctgtatattaatatgaatattattttgtataagaagcaatttattctttgctaatacttcttctacaattgactttaatgttatttcagaaattaaataatctttttcaacatggccaaggcgagcatagtacaatgcacgctcaatatgacgttctatttcttccatttgaaaacgaatttttcgtgtatgttcatttttataattttcacatataagttctgatgttgtaacaggatgttttatctcatgtacccattgttcaatgaattgtctatattcgtacatttcacgatgtatttgagaaacatgatctgtcatagatttcaatgataatctaataatattgtagtattcacgttctatgttagaagtaggtttttcaatcatttcaataaacagatattttttatccaattcgtctacaatgcgacgtaacttaataatttcttttttctgtttttgataacaaaaacatatccaacaaaataaaattgcgacccaagcggctataagaagagtcaactctccttgaccaatccctataagatgaagatatagcactaatgaaattgcacaacaaatatttaagagtataactaatactttatcttgaagaaaattacaaaacctcatatcctatatcccatcccccgttttgtaatgattaagtcagtaatacctataccccttaacttttctctaagccttgtaatgtttacacttaaagcattatcatcaatatgaatatgattgtcccataaatattctaccaaatctatacgaggcacaatactccctacattctgaaacaaataatacatgatttttagttcagttcttgaaagttctataacagcattttggtattctactgtagctgaaataaggttgagtataatctctctatatttaattttctgtttatctgatgaatctactcttttaagtaggttctttacccttgctaaaagcaaaggtaagttatatggttttgtaatatagtcatctccccccatagtcaaaccatttagttcatcaattgcactatctcttgctgtaataaaaataataggtatagtagaacaattcctaatctgtctacataaagaaaaaccatctatattaggcaaattgatatccaagagaattaagtcaggtgttgattcttggattacttgaagtacatcacaattatttgtatccaatgtttgtgtactatagccattattttcaaagaattgcattaattccttacagatgaacacatcatcttcaattatcaaaatattggttaaaataataaatacctcatttctttagtttatattgctttaattttgtaagtaatatatttttccatatattacttacaaaattactttttaattattcatcttttccagctactgatagctctttaataacaactgaaggtgaacctatactactcattggaaattctaaatcttcccctataacttcaatatctttcaacaggtcaaaatagtttcctgctactgtaatttgctccactggaaatactttttttccttctttgatataaaagcctttggcagctaaagaaaagtctcctgttactgaatttgcacctgaatgaagccctgcaaagctagtaaccatcaatccttcatctatatcctttataatttcatctaaagatttatctcctttatctatataaaaattagttggatatatgcttataggtgatgaatatgaagattttattccatttcctgtagtctttacacctgccttattagccgtttttaagttatgaagtaaagttataagctttccatttaaaacaacttcttttttaaatgtagctactccttcatcatcaaaaggagtagatgccataccattttctaaaagtgggtcatcaactattgtaactataggagatgctatcatgtctccttctctatttttcaataaagataatcctttttgagctgaatctgcattaaatatcccagaaaatgtgctaagcaaagataccatagcttcattaagcaatatagttttatatttacctgatggaatactcttaccacctactttagataaagcattatcaacaccaagttttgatatctcacaaggttttatttcttcaatagaatttgctctattatatcctattccatcatatttttgtccattgtcttctatgataggaactacaaaccctataagcatattagttttattgcttaaattaagacctttagtattagatataccattacttgatacagaataagatatagtacatttagataaatttaccaccttatctgaataagctttagtctctctttccatttctaaagctaaatcaatcaacttatctgcctctaaattttctagctctttagaataagtctttacatcattatagtgcttatctccttcatatataaattgtacatcttcattttcaatagtgtttactccatcttttacattttttatcaacatatcaacagctttatcatctaaaatttctgtataagaataacctatctttccatttaccttacctctaaaagataaaccaaaagatttatcaagattgtatttctcaacttctccttcatatatatttatacttaaattttctcctgtataataatatatttcacactcttcaaaaccttcacttagagcctttttaaataatatatctttaaaatttttaagttccacaattatccctcctatcttccacctacagtaatttcttttacccttatcataggttggcctacattagttggtatacttcctgatgatgagccacacatcccctgagcttgttttacgttattcccaaccatatctatattcataagtatatcgctaccttttccaattaaactagcacctctcactggctcttgtatttctccattttttattaagtaaccttctgaaactgcaaaattaaactctcctgttacaggatttacagaaccaccacccatttttttagcataaagtccatctggtattgactttataatgtcttctggtctatcttctccagcagcaatataagtgttagtcatccttgaagttggtgcaaatttgtagttctgtctacgagaacttcctgtaggattcattcccattcgtctaccattaagtttatctatcatataagacttcaaaattccattttcaatcagtatattcttttgagttggatttccttcatcatctatattcatagaaccccagtagtttggtattgtaccatcatctatagctgtaatctttgtggaagcaatctgttgacctaatttatctgcaaatacagagttcccctttgcaactgatgtagcttccaaagaatgtccacaagcttcatgaaatattactccaccaaatccattatctattgctaccatcatattacctgcaggacaatttttagcatgcaacatagtatgcgctactctagctgattcttttgcataatattctgggtctatttcttcaaatatttcaaaccctttacaacctccaggaccttcaaatccagtttgattttcattacccttagatgcaattgaacttatccctagtctggttcttattcttctatcctcaacatatataccttcagtgtttgcaattaatattttttggtctttatccaaatagctaacacttacttgagatatatcattactaaattcttttgcactcttatatgcaaccttcataacacttactttatctctatttcctattgaatttggataaatttttatattatgtatgttatttattttaatactgtcatttaatattacactttttccatcttccaatttacctaaagcaacagcagctttgtatgctacatccaacagactatttaatgaattgtcacttgtataagcatatatactcttcaatcctttaaatattcttattcctataccataatttcttccacctattgcattttctactttattatcaattaaactaatagaattatttatagtgtcttcttcaaaaatctcagcaaaatctcctccagtaattagacacttttctaataccttagaagctatattttttgaaagcataaatttacctcctactttaaatttttaattaacttttattcaatctttttacttgttaacaaacattatatactatattacttaaaataaggtaattatgaatatattatacatatgttttatactaaaatgttatcacattttatctatacatacccatataactagataattaaaatgtataatattatttgctatagaaaataatacactcatacataataaattttaggagtgaagtatatgaatcaagaatatgtaaaaggaaatcctatttttactaatattaataaagttccaagacaatttccataccttactgatgatattgatactgatgttataattgttggtggtggcgtaactggatgtatttgtgcttactatctagctaaaaacaatataaagtctgtcattcttgaaaaaggaaggattgcacatggaagcactagcgtgacaacttctctattacagtatgaattagatgacaatttgatagatttaacagaggttatgactctaaaagatgctctaaaagcatataacctttgtacttcagcacttgaagaattagatacatttataaagctatatggaaataagtgtgattatgccaaaagagatactctactttatactgccaacaaacttgaaattaaggctatcaaagaagaatataacttaagaaaagaaaatggatttgatgttgaatatattgatgaatccacaaacccttttagctttgatttaaaatcaggattgatagcaaagaatggaggacgagaattagacccatataaatatagtcaccatttgattgatgtaagtttaaaaaatggtcttcaagtatatgaaaatacagaagtaaaaaaagtagatttatcaaatgataaggttactgctgaagtatcgtatggatacaaagttcatggtaaaaaattaattgtagctacagggtacaatacaagtttatttacaaaaagaaattttgcaactaagtcaaatacttttaatatagcaactaaaccacttaaaaacatagcttcttggaaaaacaacattttaattagagataactgtgacccatataattatctaagaactactaaagacaatcgattaattataggtggtgaagatgtaagttttgatgatatagaaaatgaaactttagccaatgaaaagtatgatattttagaacaaagattgaaaagtatgtttaaggatataaaagacattgaagttgaatataaatattgtggttgttttgcttcaactttagataatttaggttttattggtccagataataaaaataacaatctatggtattgcttaggttatggagcaaatggtatactctttgcaatattaggaggtataatgttaagtgaattatatcttggcaaacaaaataaaaatatgaaattatttaaagtagatagatttgataaatagatattgtatattaaaagactataaaaagatgaaactttataattctaaaagttaactttgatacagtcttttataatgttccttttaaaaatactttatttataattaaatataaagtaaaatgttaaaatataactgataaaatttagtcataagataatatttaagtttatttgatgaaatatggaggaattattatgaaagaaatactcgttattgctcccactaaaggaacctatgaaaaatcaattcacatagttaaaaaaaacaaatatacaaatattgatgttgtatttggcaatctaaaagaaggtatacctcttgctgaaaaaagtattaatcatggtactagaattatcataagcagaggtggaacttacaatatgttaaaagctacttacaatatacctatagttgaaattaaagtagatgcttatgatattataaaaagttacaaagaggtaaaaaattccaacgaaccatttggaataattggatttaataatgtcatctacggtttcgatattatagaagaaatattgaataagaaaataactatgattgaaattgaaaaagaagaagaaatttatgatgctatagaaaagtacagaaagaaaggtataaacacatatataggagataccactgttgcacatattgttaagagacttaattgtaagggaatattaatcgaatctagagaagaaaacatacttagagccattcaacaagcagaacaaatactcgaagcaaccaaggatgaacaaaaaagaagattacagatagaagctatgacagattttgtacatgatggaataataacagttgataaaaattttaaaataacattatttaataagagtgctgaaaaaatatttggtataaaaaaagaaaatgcactttatcataatgttgtagatgttatcccaaacacagttcttccacaagtagttgagactatggaacctcaaattggtgaaatacaaaatatagggagtacaaaaattattacaaatagagttccaataattgttgatggccagattcaaggggctgtttcaacatttcaagatagcaaggagataagttcttttgaacatacaataagaaggagcttattaagcaaaggtctatctgctaaatacacttttgataatataattcatgctagtgaaaagacaaaagattgtatagaacttgcaaaaaaatatgcttgttatgatactcctatgattattactggagaatctggagttggtaaagaattattttgtcaaagtatacataactatagtaagcgtaaaaatgcaccttttgttgctgtaaattgtgctgccatacctccatctctaatagagagtgagttttttggttatgaggaaggttcatttacaggtgctagaaaaaaaggtaaagcaggtgtattcgaactagcacatgaaggtacaatcttcctagacgaaataagtgaaatccctcttgaacttcaaggtcgattattgagggtattgcaggaaaaacaagttatgagaattggtggtgataaagttattcctatagatgtaaaaattatctgtgcttcaaataaagacttaaaaaatatgatgcgcaatggtttatttagacaagacctttattttagaataaatatactaacattatatcttccttcattaaaagaaagaaaagaagatattataaaattatcagaattttttatacataaatattcaagcaaatacaataaaacgcctttaattatcactccaaatattaaaaaggcacttcttgaacgagaatatgaaggtaatataagggaattggaaggtatgatggaaagggctgttattgtggaatcatttgactcgattttattagaaaaggttagcaatgaatatacaaataatatagttgataaagataatagtgattttgaatgcagtaatttagatttaaaaactttagaaaaaaaatatatctataaaatttataacgaaaataatagaaatactacaaaaacctgtgaaattctaaagataactcgctccactctatggcgtaagttaaaagaaatagaagatgatgtttaaaaataatacatacctatatatatcaaaacgttttatgtttaattttaatacataaggcgtttatttgttttcaataaaaaatacaattatatgataaaaagaatctttgtaagtgaaattctcatcaatcatacctttaattataagtaatctacagcatttcaatcgattattaaaaataatcatgataactaaaaatacaaactctatatattggcatagtaattgcttttataatacctatataaaaatgaaagggagtgatactagatgcacatcttaaaatcagtgaaaaagataccaggaggacttatggtctgtcccttgttattgggagcactatttaatacagtatgtccacaagctcttgaaattggaggattcacaacatccttatttaaaactggtgcaatgagtatacttgctctattttgtctatgcaatggagctcaaatcaatatcaggcaagctggtaagccattgactaaaggtatagtacttacagcaacaaaatttataattggtgcagtattaggtattattgttagtaaatttattggacctaaaggtataattggtattacacctcttgccatagttgctaccatgactaattcaaatggaggtctatttgctgctcttgcaggtgaatatggtgactccacagatgttggagcaatatctatcttatctctaaatgatggtcctttttttacaatgcttgcttttggagtaactggacttgcaaatgtacctatagtagcactatttgcagcacttataccaatactacttggatttatacttggtaaccttgatgaagatatacgagaatttcttgcacctggtacaacattattaattcctttcttcgcttttcctttaggagcagcattaaactttaatcaaattataactgctggactacctggagttgtacttggtttaggagttactataataacaggtatgggtggctactttgtaatgaaacttatacgtgcagaacatccagcagtaggtgcagctacaggtacaacagccggaaatgcagctggtactcctgaagctttagcagctatagaccctactctagctacaatagcagctgtttcaacagtacaggttgctgctgctattattgttacagcaatatgttgtccaatgttagtttcctatctagataaaagagaaaaaaagaaaaaatctatttttaaaacaaataaaaatattgaagtaaattaatacttaaggaggtaaaattaatgaatgcaattattcatgcaaatgaaaaagataatctagttacatgtgtcagacctttagttaaaggtgaaaaagtttcaattgatggaaagtcttacatagtaaatgataatatacctgtctttcataagatggctacagaagatgtaaaaaaaggtgatgttgtatacaaatacggtgaaattataggaattgcaacagttgacataaaaactggtgactatgttcatgtacataacattgaaagtacacgtggtcgtggagataaaaaataggaggaagttaaaatgaaattaatgggttatttaagagaaaatggtcagtttggtattcgtaatcatgttttaattattccaacatctgtatgttcaagtgagacagctacaagaatagcatcacttgtgcctggagcaatagcaatccctcatcaacatggatgttgtcaaattggttctgatatagagcttacagcaaagacattaataggatttggaaaaaatcctaatgttgccgcagttttagtagttggtcttggatgtgatggtattcaagcaaaagaattagcatctgaaatagctacaacaggaaaaaaggtagattacgttgttatacaagaatgtggtggaacattaaaaacagtttctaagggaactgaaatagtaagtaaaatggctcgtgaagtatcaaaagaagtaagagttgaatttggtatgagtgaaattacattagcacttgaatgtggtggttctgacccaacaagtggaatagcttcaaacccttcaataggcgttgcatcaaaccttcttgtagatgaaggtggaagtagcatactaagtgagactacagaagtaattggtgcagaacatttgttggctacccgttttgaagatgaagaaatgaaagataagtttcttaaatttgtaagtgatgtagaaaaaagagcaattgctatgggagaagatttacgtagtggtcaacctactccaggtaataaagctggtggactttcaacaattgaagaaaaatcacttgggtgtatgtataaggcaggcaataagccattcaaaggtgctcttgaatatgctgatattgtacctcctgataaaaaaggattatattttatggatactccaggtcaagatatagattctatcactggtatggtagcaggtggtgcacaaattgtaatcttttcaactggtagaggtactccaacaggaagccctatttcaccagttattaaaatcactgggaatagtgatacatacaacaaaatgccagacaatatcgatataaatgcaggtagaattataacagatggtgctaaaatagcagatataggtcaagaaatatttaatgaaataatagaagtctgtaatggtaaacataccaaagctgaaagtcttggtcatagagaatttggcatttacagaatttcatctacattttagattgtaacaaaatatcttttataaatataatacttatgtagatacataagctaaaagttctttctaatcctataaaaattttctatactgaaaaggaactgtatcaaaattattttgaaaacagttccttttttaacctcttttactcaaaatattataaaataagatttaaacaataaacgtgtcttgattaatctctaagaagacataaataaagctaaatgtaaagtgagataaataaaatttaatatctttgtatgaaaagatatttggtataatatgtctgagagaattcttatttgtaaacaaataaaggatggaggatgaaacaaaagaatgaactttgaaaacacaaaaaataaaaaaataatagctactttactattgacactccttttaatcgtgtcattaacatgtgtcaattttattatgaatctaaataaagtaacacataatgaaacagaacgatatcttgtagaagtttcacaaagtatttccactacaattaatgtgaaatgtaaaagtatatttaggacactatattctatgggagatacttattttgagattaatgatagtgaaaaagaagtcaatagatacttatcaaaaaaattaaaattatttgaatttgattggttaggtattatagattctaatggaaattttgtaagtgcccttaaagatacaggtaatgttaaaggacaagacttttatagaaaagcccttcaaggtaaagaaacaattactcctgttaaatcacaatctggtacatatggaattttatattctgtaccactatacaatggcgataaaattgttggagctgttgctgcttggaatactattgatactatgagaaatttattaagtgtagaaagctttcatggtgaaggattttcccaaattatcgaccaagatggaaattttattgtaagttcagcaaacaaaaatgctccaaaaaatgtggtaaatttttttgacatgattaaacaccaaggaaaacaggttgataaaaataaacttgaagaaatgaaaataaacttaaaaaagaacaaaactggttctatgtattatacattaaatgatggtatttctaaggcaatgcattatcttccattacaagaagaaaacttatacctcctttcagttgttccaacaaaaacagcaagtgcacagtttgatttacttctaaaaaaagcaatcttcatcaatattttaattgttatactatttttattgcttattatattgattatgtttataaatcaaaagaacagggcacaacttataaaaatcgcctatgtagactctgtaactaaaggttacagtaaagcacgttttgatattgaagctaaaaaaattatacagtcatcttcatcagaaagctattcattggtatctataaatattcagaaattcaaacttattaatgattcttttggtagtgaagcaggagataaaacattaaagtacatacatgatgtcattagtaattatctagaaccaggagaattgctttgtcgagtttctaatgaccagtttaatgtacttattaaaactattcctcaaaaagaaattcttaagtacatagaaaatatcaccaatgatattaatagtttcaataaaaatgaagaatgtaaatattttatagctctatctataggtgtatataaaattgatgacccaaatctacctttagtttcaattcaagaccgtgcaaatgttgcacgaaaaaataataaaggaaacattggaaatcatccactttatacatgtgttttttatagtgatttagagcgtttaaaaatgattaaagaaaaagaaatggaaaatagaatggaggaagcattaaataataacgaatttatagtatatcttcagcctaaaataagcctcaaagataatactattgtaggtgcagaagcattagtaagatggcaagacccaaataaaggccttataccaccagacgagtttattcctttctttgaaaaaaatggttttattacaaaactcgaccactatgtttttgaaaaagtatgtagtatgataagaaaatggatagataatggagaaactccaatgcctgtttcagttaatttttcacgtgctaatttaaataatatagattttttagaaaaatacagaatgcttcgtaataaatacaacattcctgctaagctcttagaaattgaattaactgaaacacttgtatttgaaaatctccaaaaattaattaatataatagaccaaatccatgaagaaggttttcaatgttcactagatgactttggaagtggatactcttcactcaatatgttaaaagaaataaaagttgacacatataaaacttgaccgtgctttttttagctcacctaatgcagataatattgctgaaaatcatgtaatagaatctatagttaatttggcaaaaaaattaaatatgaatagtatatcagaaggtgttgaaacaatcttgcaaatggattatcttaaaaaaattaattgtgatatgatacaaggatatgttttttcaaaacctctgcctcaagaaatatttgagaaaatgacttttggaaaaaaactagaagaaaccagtatggatagttccgtttaaataaaataaaaaacttgtctctataaaataattttaatcattttataaagacaagtctttttattttccaatttaattttattttctaaatttcttatactcggcttgttttaaattccctttttaagaataataatacgattatcatagcaataaaatctgcaactggctgtgccaaccaaacaccatctaaattaaattgaattggaagtacaatgattaatggtataaataaaataaattgtcttaaaagagttaaaaacattgaatgtttaactttacttatacactgaaaatacacaggtcctacaatagaaatccccattataggcaatgtaattagatttatgcttatacctcttactgctatatccatcaaatctgaatctttattaaatatacctacaaatacttctgggaaaacttgtactattaaaaatccaaatgacaatatgacaactgacactatgatagataatattaaagttttctttgcacgttcatattgttttgcaccataattgtatgatattatagtttgcataccttgattcaatccaaacacaggcatcataaacatcaataaaatagatgtaagtgctgtcatagccccaatagctaaatctccaccataaacctttagagaattgtttgtaaacatgtgagttatacttatagctacttccatagcaaaaggtgtcattcctattgcaaataccttctttactatatctttattcaattttaagttacatttttttagttttaaagtggacttccctcttataaaataatatgttacccaaaagaatactactatttgacatagtactgttgctatagctgctccttttatacctaaattaaacacaaatataaatatagggtccaatatcaggtttaatacacatcctacaatcattgtccttgctgctaattttggattaccttctgctctaattgcattattaagagaaaatgcaactaaattaaatatacttccaatcaatatgacactcatatagtcttttgcataaaatattgaatctttacttgcacccaaaataaaaagtatatcttctaagaaaactaatcctaatatagttataattaaagagataattatagataatgtcaaagcattacctaatatcttctctgcttcttctctatttctttcccctaattttatagacaatcttgtgctagcacctactgataccaacattccaaaagctattattagagtaaatactggcatagttacaccaagacctgcaatagctatagagccaataccttccatagaaccaataaaagctctatctactacattataaagtgaagttaccatcattgctattattgccggtatcgaatacctaaataataaaatccatattttttcatgtcttaatgcttcttgattctccatgttgtcaccatttacaccatgtcataagttatacaaattggtttatttgttcttgggtctgttgctatttctgcatcaatattaaataattcttttagattatccttcgtcataacatcatatgcatcaccttcacaaactattttacctttcttaatacctatcatgtggtcagcaaatcttgctgcattattaagttcatgtattaccatgacaatagttcttccttgttttttatttagttcatctaataattttagtatctctaattgatgtgccaaatctaaatatgttgtaggctcatccagtaataatatatcagtttcttgtgccaaagccatagctatccatgccctttgtctttgtcctcctgataaatcttccatatttctatccttaaattctgcaattccagtaacttctaaactccaatttacaatctctctgtcttctttactagaattaccaaatccacttttatgaggaaatcttccataagaaattaattctgaaacggtaagaccactaggagcttgagggctttgtggaagtacagccatatcctttgctatttctttagacttctttttgtagatgtcctctccatttatatatattttcccactattagggctaataattctacctatagttttaagtattgtcgattttccacaaccattagcccctatgatggtagttatttttccttttggtatatttaaatttaaattttttataatatctgtgtttccatatgatacatttagattcttagtatttatacagttcataacaacaccctttcctaatcatttaccaacattaaataaataaagtacggcactcctattatagaaactactatacctactggtatttctataggtgctagaagatttcttgatatagtatctgctattaaaagtaataatgttcctatcaatgctgatactggtattaatcttttatgctttggtcctattatttttctacctatatgtggagctattaaacctaaaaatgaaatactacctgctactgctgtcgatacaccagataaaattactgcatatattataagtcttcttctttgtttttctacatctacaccaagacttatagatacttcatcacccaaatttaaaacatctatatatttagatttataaatagttatacccataaaaatcactataaatggaagcacagctattacatatttccaactggttccccaaatgcttcctgatgtccatgccataaccctattaaattcttgtgttgtaaatttcaattggaatatcgtcaaaattgaagtaaaagctatgtttacacctataccaataagtagtaatcttgacgaatttataccacctttccatgcaagagaatatataagaaatgctccaaataaagctcctataagtgcaacaataggcattgtaaatacagtcaagttactcataccttcatatacattaccattcataaggtatatataaactactacaaacaatgcagcacctgaatttattcccaaaattccagaatcagctaaatcattctttgtaactccttgaagtattacacctgctgttgataatgcagaaccaaccaaaagtgctattactattcttggtaatcttaatttaaatattgcaatttcatgattacgctgaccctgccctaaaaaagtctttataacatccattggttctatagaaaatgagcccatatttaaactcaataaaaaagtgataaaaataagcaccattaaaattgatataacaagtaatgttttagaatttatttttataatatttttcatagtacctatttctccccctttctaacaaggtatataaatattggcactcctataagtgctgttatagaacctactggtgtctcatatggaggatttatcatcctacttaatatatctgtatatacaagcaatacagctcctaatactaaagagctcggtattatatacttataatctgaacctactattcctttagctatttgaggaactataagacctataaaaataatattaccagacactgacacagatgctccagtcattaatattacaagtactatacatataaatctaacaaagttagttttttgtcctaatcctattgccacttcttctccaagacttaatatagttattcttggagccataataatagctaaaataaatccaataccaccagctacaaatagcaattttataccttcccacttcactcctacaagccctcctgatatccagaaacttaattgttgagataggttaaaatacatagatattgctgatgccaaagaaattagcaatgtaccaagagcgactcctgcaagagctaattttacattattaactcttcctcttgatttagaacttataaaatatataaataatccacttatacttgctccaataaatgcaaacatcattacactaaaacttccatgtataagttgaggaagttttttttgaagtaccagtgatatcgaaattgcgaatgtagctccttgtgtaattcctataacagatggttcagctataggatttctcgttattccttgcattattgccccagaaactgctaaaaaccctccaacaagtgcagctgctattgctcttggaagtctaacatcctttactattctcatatttattccatcttccatttttatcaaactatctatgacagttgatagattcatatcttttgccccaatagttatggataatacaattccaaatacaagtacaactatacttactaatatcaacaaataagttatattttttttactcagcttagtcaattatcctacctccttttcccttttaatcgtcagtataatatcatctattaagtattttaattttaagatttattaaaaataggtgtgaaaaatgaatatcattatctcacacctactaagttaagaattactttgttaattcatttttaactgattctaataataactcttttccaattggattgtatgattgactgaaaaatggagcagcatcaagtattgttacattaccatcttttactgctcttatttgagaccagatagcactattttctaaatcttttttatctgcttctgtagcaattacaactatatggtctgcatctatatctgttaaaccttccatacttaccattggtagtgttattccatcctgttttggcatattcttaggtctagctaatttcatatcatcattgattagagtacctattccaccatcactaaataccataaattgacctgaacttgccaacactggtaaataagttttttctccattcttttctataacttccttacctaactttgtagctttttcatcatacttctgtagccaacttttagcttcttcttctttgtcaaataactttgaaacatcagttaacttgcttctccagtcatttgcataatctttcatcataactacaggagctatttcttttaattggtcatatattttttcttgtctttgactcattattattaaatcaggatttacttctaatatagcttccatatccatagtatccatcattgagtgcccaactatctttacacctttaagctcttctcttatgtaacttggtaatttatcagtttcatatgagtctacatttgctgttgcaacaggcttataacctgctaataatagttcttcactacttcctgatatatcaactatttttttaggatttgatggtatcttaacctctcctttaacagattgtacaactcttgtctctgatttatctttatcctctgtattcttatctgaacatgctgtaacaagtactaacgtagttataatagatataaatattgcaagtgattttatttttttcatgattacttctcctacttgtttattatacttacatgatattgattatcataagcacatatttattatagcatttttctatttttagtcaatattattttgtaaaaggataaaaattcctaattaatcttaattatatatagcttagataaggttttcttatattaaacagtattttttttaagaattggacacaaacacaatgacttttaggttaaacaatgataaaatgcaatttatagataatgaatttagtaaggaggattcaaaacatggtacatttagtatattgtgataatgcaggaaaaaaaggagaaaaggtcttagataaaatcttggctggaacaaaaacaatggttattagaggtgctgctggtagaaaaataccacatagtagagtatttgaagatgagttactttattttatggaaaaaggaactggaaaaatatctgcaaaagccactgttaaaaaagtagaaaactatgttaaattaacagaagatgaaatttctaaaattttaaatgaaaatcaaccaaaattaaatttatctgaaaagcaaaaagttcgttggcataaaaaatgtttatgcttagttgaatttgaaaatgttgaagaaataacacctcttgattttgaccatcaaggaaatatggatgattggcttattgttgaaaaaattgaagatgtagttgttggtactagtataccttacaattatgagaagtctaaattttaaagtatcaataacataatactatattgctaaactctacttaaataaaaaaagagtgcatttaataattataaaaattatttttatacactcttttttaataataaatttaaattacttactttctaatctttcatatacatctataaattcttctgctaattgttgaaaattcatagctgtcattaaatggtcttgtgcatgaataagtataacacttatttcagttttattaccattagcttcattttgtatcaattctgtttggaatttatgagctttatgaattgattctttcgacttttcaatacattctctagctttatctatattcccgctctttgcttcttttattgcttcaaatgctagccctttcgcatcacctgcaaatccaattattccaaaagatatctctatcatcttctcatccatttattcgacctcctaaatatctctatagcttgatatgactaatccattcttttctaaaaattctttgacttttttagatgtaagtatcttgtgctctttcgttctatcaatagcataagatgtagaatttaaaatataatcatctaaaaaagctgggtgagacataatatccactacatcatacttcattatttcgtctatattttttataaaatattcttcacttacattttccttataaaaactatctattaaaggaactactttagaatactctaaattatattcaaatccacctcttattggaagattatacttggttacaatcttctctactactggctttaaacttactaaagtatggatatgatggtgactatctaaatgagatatatctattccaagcccttttaccctatctatttgagcacaaagttctctataaatctcatcacaatccattttttcaataatttcgtctgtaatcctcctaataaaaaaaccgtctttatcaacaatagtttttaagttagataataatggtctaccacaacttaaagtcatatgaactccacaatttaaagttttattttctttaagtaagcctactccatgttctaccccaggcatatttgccatcatagaagtagacctaactataccattattatgagctgaaattattccatagttcacagcttcacaatatccaaaatcatctgcatttattataattttagtcataccataacctactttctatagacaactatctattaaatctaggaagataatctttatgagcttccaacatttcgtctaatatagtttttgctaagtcatcagatggaatcaatgggtttatacaaagtgccaaaagagcagattcataatcgccatatacagctgctttagctaccaatacttcaaatgatttgatttggcttactaatccatgcacagaatctggtaaatatcctatacttattggttttggaccatttttggttattacactactcacttctaccgcttgttcatctttaaaatctcttatagaaccattgtttaatgtattaactacttggatatcttttttgtcattgtatatagaacttattaaattacaagcagcatcactatagtaagcccctcctcttttttcaagttgaggtggttttacatctaatttttcatccttatataattcaaataattgttcttccaattctttaactacttgacctctagcttttccctctttaaactctctcaactcatcctcaagcatttctttagttttatagtagtatctatgatatggacaaggtattgcacccaaagattttacaaattcagcattaaaatcaattgcctttatattttgcatacttatatctgctttgacaaacttatcaattgcttcttttgtaacatcttctccatctaaagatacatttagaccataaaccatatgattaagacctgcaaaatccatacttattctgtcactttctacattaaatagtttggcaacatcattttttaaatgaattggcacattgcatagacctatatatcttctaaaattagtatatttgaatacagcctctgttattattcctgttggatttgtaaaattcaccatccatgcatttggacataattcttccacatcttttattatatcaaatataactggtattgtgcgaagggctttaaataaacctccagcaccattagtttcctgccccataactccatgagataaaggaatagtttcatcttttattctcgcatctaaaagacctactctaagttgtgttgtcacaaagtctgcatctcttagagcttctcttctatctaaagtaagatttattttcatatctactccagctttttttaccatcctcttagctagatttccaactatctctaatttttcttttccagcttctatatctacaagccataattcctttacaggtaactcttcatatctatttataaaaccctctacaagctcaggagtataacttgaacctcctccaattgtaactatttttagtccctttttcatctcattataccatccttacctataatttaatatactctacaaaaccctatacatttatttaccgaaataaaactacctagttgttaattttcaatttattagcttccattttttcagacgctatgacaaatggaatatatattaatattgataatattaaattaaatagtgctaaagctccaccagtccagtcacctgtagccatcgctccacctaatataggaggtgttacccaaggtattttaggtaaaattactggtgctactaatccaaaatctattgctaagtatgatacagcactacatatcactggtgcaagtacaaatggaatcataaatataggatttaaaactattggaagtccgaatatcaatggttctcctatattaaatattgcaggtggcccacctaatactatcatttctttacgtcttctcccagctattaataaagctactattaatcccaataccattccagaaccacctaaatatacaaatgcatcaaagaatgcacctgcaagtacatggtatccttccgttgctcctgcttgagccaaggcagcattttctccacctaatttcataagtatagtttctgtaaaaggaagtgctatatttgcaccatgaagtccaacagtccaaagtatatgaattataaatgcaataagcattgtagaacctagactatcagctacatttgatagcggtgctcctaaataagtatttaaaatatctgttaagaaacttccattagaaagcatttttataaatattcctattacagtaaatatcattatagttaacattcctggtattaactttgcaaatgatcttgaaactgctggtggaactccatctggcatttttatagttaatttctttaccttagataatcttacaaatatctcagttgataataatcctattaatatagaagagaataaagctgctgtacctaagtaggtttgttgtatcattccccatccttcaactactgtagttcctccctcaggaactattttaccaatttgtggagccattataaaaaagatagataaagctataagcccagattgtaacccatcactctcataagattttgctagaaaataagcaacacctattactaagaatactgccattgtacctattgctccccaccaaaggtcgcctccaaatgtggtccaattttctccaaatatacttgccatcaaatttttgtatgcttccaatggtaagttatttatcaatgttcccaaggcacctaccatagttataggtatcattactataaatgcatctcttactgctactaagtgcctttgagctcctattttagcagctacaggcactatatatttatccataaatgacatgaatttttccattttacatcctccagtacaactttattttgaactatttaactctacagctctatctaacacagcttttccattacatcttccataatccatcatatttataacttctactggaatattatatggttttgccatttcagttgcttttcctaatacatatctaacttgaggccctaaaagtaagacatcacaattttctatttcattttttaagttcacttctgatatagcccatatttttgcttctataccgttttcctttgctgcatcctccatttttgtaactaataaactagttgacattcctgctgaacaagctaacattatttttatcattttttcccctccaaattagattcattaaatattttttaagtcataaattttttaaactatacatttaaaatatgcttttctattaattttttcttaatgtatatatcttatttttaaatgtatatacatttaattcttgatattattatataccaaatgtatatacatttcaagaaaactttttcattttatttaaattttattcgacaacagcattcaaagttaatgtatatccatagtgatatgtgtgtgagtactcaaaaatctcactattttgtaacttacaaatttggcttatatataaaagtggctctggttcttctaattttagattatccatacattcttcattcgatattacagcttgtacttctctctctgacatggctatcttgtatccacacacttcttcaacaaaattataaagagaattttcacaatgagtcttatttaaatttggaaataacttaactggcatataagtaatcatatatgaaactcttgcatcattggctaatcttactctttttatttcccaaacattttcttctaaacttatattcaacttacttgataaattttcatctgcctgaactatttcaagagataccaatatattagatactttatagcctttactttccatctctttagtaaatccacttacagacgatatattatcatatatattatttgcaataactatactacctacacctctttgtctagtcatatagccttctttaactagattattaagtgcagaccttacagtcattctagttacattaaattcttcactcagctgtttttcagaagggattaaatccccttctttcaaactgtctgaatttattaactctctaacatgattttctataactttataaattggctctttcatttaattcactccttattaattaaatcttttatataataagataattttatatacaaataaagaaaatgtctatacatttaagataatttaaattttattcagacatcttgtacaactttccgagttttaataaagatataaatagacttatcattaatataccttttaatatacttgataaggttatactccaccatacaccatttagacccaacatttctggtctagatataaagtaagccaatggtactcttgcaccagtcagtatagtaattataatagaaggtatataggttctgcctaatcctttgaaagctcctgttgttattatttctaaacacataaaaaattgagaatagcctaatattttaagataaattgctcctttttctattgcctcactttcatctataaaaatagaaaatatactctctcctgcaaatactaataccaaagtagttattatcccaagtacagaagatacagttatagctattttgcaacctttatttattctagaatacttcttggcaccataattttgtccaacaaaactgcctaatgcaactgatagcccttcagccgtcatccaggaaattgcttctatttgtgagcctactttttgtactgcaacagccacaggcccccatgatgctactattactcctaatagcattgagaatactgtaaacataccactttgtattgctataggtaatcccaatttatacagaactttataatatttagtctctatttctttaaatagtcttaatttaaaatattcttctttacttttaactattatatatataaaacatgtagtaactactatctgagcaaatacagttgcaatagcagctcctgcaacaccaagttttggagcaaatccccatccaaaaattaatataggatcaagtataatattagttattaatcctactgtattaatacgaaaaggagttttactatttccaagaccgttgaaaattgcagtaaatactggattaataaaataaaataccatacctagagctactattatcaaatactgtctagacatggttataacttctaagtctcctaatctaaaaaaacctatcaattgtttattaagtactattaaagaaattgtatatattattgctagtataatatttatttctattgctgacttcatatatgatttagtagtgcttatattatttgcaccaatactttgtgctacttttatctctccacctacttttgaaatcataataaatgccattgcaagccatggaaaaaaaccagctgttccaactgcagctactgctttacttccggctttaccaacccatatcatatctatcatgttataccccatctgtataaatgaagtccccattattggaagtgatagcttaagtaatttttctgtaattcttccttctgttaaattaattctgtctttcattttccacctcttttatattaaatttatttgcttatatagctagattaatcattttatttgattgagttcactatccttcaatttatattatcatatctcaagattgcatctcaaccatacttatgtttaagataaagtattttacctatctctgataaaattaatacttatgaatataaatatagtcatttcatcaatacatattataacccttaacttaacttcaattaagtatacatactgtaatcaattagaatattttataatgtatcttccattaagaaataacaaatataagtgatttatctataattttatttatacataaaatagtatactgcaataataaaaaaactatatttgaatactttaagcatgtttactaattgtaatttccacacaaatttgataatatatgaatatattatggtgaaatttatagatatatattaattatggggagattgtgggaggttcttttcacaagacatttaagctatgaaaataaataaaaaatttaatagagttgatatgcaggtttcaatacttactgcaattattgtaataatatcttcctcatgtgtatatttttttaattatacattaacttataagagcatgatatactctttaagtgagaggtcaaaacatatctatgaatatgtagagagaaatattgataaaaatacctttactgaaattaattctaaagaagaccaatcaaaaaagtcttataaaagttctaaaatcctattagaatctgtaaaaaatactactggagtcatgtatctatatactgctaaaaaaacaaaagatggatcactagtatatgttgttgatggtttaaattcatctagaagtgattttagaaatgctggtgatttgatagaaaaagagatttggggagatcttaacaaagcattagataatcatatattgttacctaaaaagattaaatcaacatcttggggatacatatttatatcgtattttcctattcacaatgatgttggtaaggttgttggagtaataggaattgaatttgaagcaaaacatcaatacaatacatttaaatttataagtatagttacaccaataatagcattattaacttgtctaatatcagcattgattgcagtgattctatttaaaagaatatctaatcctacatatactgattttgctaatacagattatttaacaggcctaaaaaatagaaatgcttttgaaatagatatgaataacttaaacaattcaaatctaaagaatctaatatctatcatatcaatagatttagacggtttaaaaaagattaatgataaatttggccatcagacaggagacttatatattaagcaagcaagtaaaattatacaagatgtaataaataaaaaatatatagtttatcgtattggaggtgatgaatacataattattctaaaaaatttatctcacaaagaaataaatagtattataaataatattaatttaaaaatagttgaagaaaactcaactaatgaattaaaattatcaatgtctattggatatgctatttttgatgaaaaagtagatgtttctttatttgatacatatcgtcgtgcagattctcaaatgtatgataacaaaaagaaaattaataaataatatcaataataaatttaaaaagtctattctttaaataataaatcataagaatagactttttaaatttgtgtttttataagataaattatttaattaaagtttgttcttttttctaaacgattctttataaattcatatattactttcactaatatatttgtgactaatattaacacagctagtgctgctgcctgtgcagtactccccttatcatctagttgtacaattgatattgcagctacttttgaacttgcagtatatataaaaactagtgctgatattgtcaccatagagtttagaaaaaagtacataaagttctctaaaactgctggcaaacaaagtggtatagttacgttcttaagaattgatgcgctgtttattcccattgatttagctaccatgtccaattctttatctactttcttaatagcagtagtagctgttataaatgctactgaaaagaaatgaactatattacatataaccattataagtaatgttccatataatccattaaacaaatttttaatgtatattgtatccataaaattaaactctaatttattaaaaaataatacataagctatacctaaaactaatcctggcaatgccataggcaatgtacttaaaaaatacccaaatgattttaaatatggagctttttctgttttttcatttaaatatgcaaataagaaaacaaagctcgtccctagaatagctgtcaatagtgacatttttattgaatttataaatggtttaattccatcaatactgtttttcatagaaaagtgttccagtgtaagtcttaaatcatatggccaaactgatattaatgaggataagattacagttaacattacagctattataccaaatgcaataattcctacaacccctcctaaaatactatctcttaacttattagttttaaccttatatggaattgactttgaagttatatatgagttttgatttttttcaatttttttagttactataaacgatattattgcaggtattaaaagtaatattgatacagttgctcccattggcatattctgttgccctataatttgcttatatacatctattgataatacattaaactctcctcctatcacctttggagctccaaaatctgtaaaacataatgtaaatgatacgaatgcagaacttattaaagagtattttatacttgggattgttatgcttataaattctcttatcttgcttatccccatagtattactagcttcatatagtctataatcggttgaacttagagatatataaagtatttgaaaggattgaggaaatacatatataatttgtgccaatattattcccactgctccatatattggaacatgcactccaagtaaattagttaccaaaccttgatttccaaataaatatactagacctattgcatgcatcattgttggagcaaacataggaaacatagctaatgatttaaaaaaacctttaaatttaatctttgttctagttaatgcatatgcatatactaatgcaagtgttagtgatattacagttgatataactgatacaaatactgtattttttagagaatttaatagagattcagaagccaagtattcttgaaagttttgtaatcctacaaagactccatctttatctaaaaaagcctgtacaaatagatatattataggtgctaataaaaatattactaaagacataactaatactgtaagcatacatttttttatatctaaattcatttttgatttaagacttatacttttagaacttatagcattattattcatacacttatgctcctttaacttttggatactttaaatagtatttttcgtctatacttatttttacaaggtcaccttctactaaatttaaattaacccactcttttatagaaacatcacttattatgaaattttcatttaatttatcttttatttcaactctcaataaattccctctaaactctatatttgatattataccttggtagttttcttttgtcgatttctctatttgaacatattctggtcttacagttaatatagaatctccattatcaaaacagtttgtatctcctataaattgagctgtaaataggttttgaggattttggtatatttcttctggagtccctatttgcattatatctcctccatttagaatagctattttatctgccatagttatagcttcttcttggtcatgtgttaccattattgtcgttatattaagttctttttgtaatcttttaatgtccattctaagcttgtgtctaacctttgcatctaatgcggacattggttcatctaaaagtaaaaactttggttcaagagctaatgctcttgctattgcaatcctctgttgttgcccacctgataatgctttaggatatttatgagcttcattagtcaatccaactgtttcaagtacttccttaactttattatctattttttcttttgaaacttttctctcttttagtggaaaagctatattgttataagcagtcatattcggaaataatgcatatgattgaaatactataccaaaacctctctttgatggctctaaatttgtaatatctttatcctggagaattatagttccactatttacatcttcaagacctgctattattctaagtaatgtagttttaccacatccactaggtccgagtaaacatagaaattccccttcttcaatatccaaactaatattatttaaaacccttttttggtcataacttttaaacacattatttatttttaagtaactcatatcttatctctccttatatagttatttttttattttaaattttatatcctactttttcttctaaaattctttcatctaaattattaatttaaaccttacttactttcagattttgaaccgtattttgattcccaagttttaagtactgtacttctgtttttggcagcagagtttaaatcaacttcttttataagctgttcaaatggttgtttagaataaccttttggaactggattatatgtctttatggaagtaactgctacttcatgtgcatatctatccatagctgaatcacttattgcccaatctaaaaatagctttgcttctttttttatattatcttttttaactaaggcatttgcttctaagtcccaacctgaaccttcctttggaaatacaacctctataggttctccactagataattgttgtgtagctctatatccaagtgtaatacctattggatactctccagagccagctaacttcgcaggttttgaacctgagtgtgtatatgtagctatatttttatgtaatttatccatgtaattgtaagcatctttttcacccatcatttgaataagccctgatactgtaagataccccgttccagatgatgctggatttggcattgttataagtcctttatattctggttttattaaatcttcataactttttggaatatctatacctagtttcttaagttccttataattaactactattgctgtctctgggacactcattcctacccaagatacatcatcttcagtatctttaaattttttatcaactttatcataatttttaggcttatatgcttcaagtgcaccatctttttttagctctatcatgttcattgctgataatccccatataatatctgcttgtggattatctttttctgctaatagttttgaagctattacaccatgagaatccataactatctctacatctatattgggatactcttctctaaaaccttccatataataagctatctgctcttcctctagtgctgcatatattgtaagtttattatttccttttccttgagtagtttgtggtgttgttgatatgcaacttgtcataaatgtaatcactacaatgcacagacaagtaaatataaattctttcatatcttccccctttgtgttttttcctttttttatttgttttttattgtttttgcttatgtttatataatacacctaatttgttaatataaagttaagtgtaaattaacagttcgttaatttttagaaatttttgttaaatatattatttttagttaaatacagtctgtttttaaacaatatattaatttttatagtatctacattttaatttaaacataaaaaataagtctaacctctataaagtagaatgttagacttatttttataagtatttaattatacaaccaaatcattttttttcttttcttcaagtgcttttttaagcaccatatccttaaccttcataagtctagtagtacttgctctctcattttcttcaagcttcatagctatatacttaatagtctcaatgtaatttggtatcattacattttcaagagcattaacacgtctacgtgtcttttctatctcttgtgcaagaagctgtgcacttttttcactttctgcaagtcttaaaagtggttgcatagcatctgagaaagcttccatagcagaatctaattcacctgatgtaaaagcaagaccataaggataaatatcactttgattgttttcagttttaaagtcaaacacaggaacatcaacactcattatatttctcgtagaaacatctactgaaactgattgctttggcatcataagtgctgaacccagatactcctgactcataactgctcttgcgattataaagtttttataagcagtatcaagagcattttctgcttcttcacgcaatcgcttattttctcttacaatctcaagaaattgtttcataagttcatcaagtttatctttaagaagcttatgacctcttgtagcagttttaaggagtttcttaagtctagtcatttccatacgtgttggatttatatttaatctagccacagatatcactccttaggcatatatttttcaaaatattcatcacggatacgtttaagttcactttttggtaacatactaagaagcttccatccgatttctaatgtctgctcaatagttctatcagttctaaatccttgtgaaacatattctttctcaaattcatctgcaaacttagcatacattaaatcaatctcagaaagtgcagattcaccaagtatagccataagttcttttgcatccttacctcttgaataagctgcaaaaagctggttcattgtatctgcatggtcttcacgagtcttacctttaccaatacctttatcttttagacgagaaagtgatggtaaaacatctataggaggctgtatatcttttttataaagttcacggctaagtataatttgcccttctgtaatgtatcctgtaaggtcaggaattggatgtgtcttatcatcctcaggcattgtaagtattggaatcatagttatagacccttcatgccctttcatttttcctgctctttcatacatagtagcaaggtcagtataaagatatcctggatatccacgacgtcctggaacttcttttttagctgctgaaacttcacgcaatgcctctgcatagtttgtaatatccgttattataacaagtacatgcatatcttgctcaaaagcaaggtattctgctgctgtaagtgccattctaggtgtagatacacgctctacagctgggtcatttgcaaggtttacaaacactacagaacggtcgattgcaccagttgctttaaaatcgcttataaaaaattcagcatcttcaaaagttataccaactgcagcaaatacaacggcgaacttagaatcagttccacgtacttttgcctgtcttgcaatctgaactgcaagattggcatgtggcaaaccagaccctgagaatataggaagtttttgccctctaaccaatgtattaagtccatctatagcagagactccagtttgtataaattcggccggataatcacgtgctgctggatttattggagctccatttatatcaagtcttttatctggtataatttctggacctccatcaataggtctacccattccactaaaaacacggcctaatatatctggtgaaactccaaagtcaagactctttcctaaaaaacgaactttactttcagcaaggtttatacctgttgagctttcgaaaagctgaacaagtgcagtatctccatttacctctagaactttgcaacggcgaatttctccatttgaaagttcaatttctccaagttcatcaaattttacaccttctacgccgtttattaacataagaggaccggctacctcttgtattgacttatattcctttatcatagttcttcagcccccctctttttaataaggtctgcaagctcgttgtctatttcatcttcaattgaatcataagctgcatctatatcgccttcttctacatacttagcacgaccaatcttttcaagaactgaaagcttgataatatcgtttatagtaacattttgcttgatagcatcttgtgctgacttatagaattttaatataagtcccatcattctatattgtttatgaagtgatgtataagtatcaacttcatggaaagagttttgatgaaggaagtcttctcttatagaacgagtaacctctagtatcaatctatctccatctgaaagtgaatcaaccccaaccaattgaactatttcttgaagttcagattcaacttgtaaaagtttcatagcttgagctctttgagctgagaaattatcatttacatttttatctgcccatacatcaactttttcctgatagagtgaataactagtcaaccagttaattgctgggaaatgacgtttatatgctaaagatgcatcaagaccccagaatacttttactatacgaagcgttgcttggctgacaggttctgatgtatcaccaccaggaggagaaactgcaccaattgctgtaagtgttccttctctttcatccatacctagacaatttacctttcctgctctctcatagaattgagcaagacgtgaacctaagtatgcaggataaccttcttcaccaggcatctcctctaaacgaccactcatctctctaagagcctcagcccatcttgatgtagagtctgccataagtgcaacactatatcccatatctctaaaatattcagctattgtaataccagtgtatatagaagcttcacgtgcagcaactggcatatctgatgtatttgctataagcacagttctttgcataagtgactcgcctgttcttgggtcttttaattcaggaaattcaagaagaacatctgtcatttcatttccacgctcgccacagcctatatatacaactatatctgcatctgcccatttagcaagctgatgctgtgtaacagtttttccacttccaaaaggtcccggtatagctgctaccccaccttttgtgattgggaaaaatgtatctataactctttgacctgtaacaagaagtgaatctggtgttttcttttctctatatggtctttcttttctaactggccatttttgcatcatagttacaggtatatcattacctttttcatctgtaataacacaaactgtatcttcaacagtaaattcaccagaatatatttcttttatagtacccttaactccataaggaaccataattttacattctactactgctgtttcttgaacgccaccaattatatctcctgctacaaccttatcaccaacagattttttaggtttaaattcccacttagttgttctatcaagtgaagatacttcaacacctttagttatattagtacctgaaatatcatacattttttcaagtggacgttgaataccatcataaatagttgaaataagacctggtccaagttcaacactcataggcattccaagagaaactacttcttcccctggtcctagaccggaagtttcctcataaacctgtatagaagctttatctccatgcatttctataatctcgcctataagatgtttatctgaaactcttacgacgtcaaacatattcgcatctctcatgccctccgctacaacaagcggtcctgacacctttacaattgtgcctgttttcatattctctcacctgcaatcatatactttatcaaaatttaaatattccctcctatattttattagcacatatctttagcaccaataaaatttgagattgtcttttattcaactttcatctattctttaaataatatatctgcacctatagcacgtttactagattctcttacttcattcatacctaatcccatacttcctccaatacctggaataactataatggcaggaagttggtaatctttgtattttgctattgattcttttgcaagcaatgatgcctgttctgtaatataaattatcgcatattcatcttcaaccaacttatgtatactttttttaatttcgtcactatcataggctgggaagatatctattccaagagctaaaaatcccatgatgctatctttatctccaactactcctaccttatacataagcatcccttagcctttcttttatagtatctgcgtctatattattaagcttactagtcaaaataattctaattgtttttatctctgattctttagcatataaatatgcaattagtggttctaatgtaagaggcttaaattttgctcctctaacatattccataagatagtcatcacaaagtttttcaaagacagtaaaaccactatccatgccatttttacagacatcagagtaagaagtagatttaaaacatgatgctggagtatctgaggaaaaagcttctaagaatttttccttatcaagtgagccacctgaaacaaacacattcataaacatatcaaaatctttcttcatatttttgactcttataaaactctttagatttgttaaatcgcaaactttcataacataatctattacaaatttgttttggctttctttagcagtttctttcatactggtaaaggttgctttatctagaacaatatcaaccatctggccattttgtgtcttattataaacatcaaatgcctctaatatagctgatgacattatcttaggtaaatcactaaaactacgatttgctaaagattctctaagcttaataagaggaattgtacctccatcaattaaatatttctcaccatctacaccagaaatttcttctttaatcagcacttttaaattgtgatagtcatttttataaagaaatacatcaacaaatttttcttcaggagctagacttttaagaatttcatatgtctttgataattcttgagtcaaaatattctcaaaattatgtatattattatttgatgtatcagcataacctgcctcagctataattcttaaagagtcttcagggcttttggcttctgccatttgaataaacatttgtctgttaagaagctgtttttcaagcactcttattcgtgcaacggcatagggataagttttttcttctgccattttttaacccctccttaattaaacaaaatttctgctgcaatttgttcaatatattcatgctctactgcaattatggcttcaaatgaataattgtactcaatgtcaccttttttaactatgaaacctccagtaatatctctagtttcatcagacactttaatgcctttttttgatagcacatcttttaatgtttttttatcttttttagataatactatctctgaatcatctgtacaatttgatttttcaatcatgtttagtataatctcttcatattcattatctttaagatttaaaagtttgtttttagcttctaaaattacctcttctaaaatctcttgtttttttgataatatttgctttttagcctccatataagctcctgatatttccttagaagccgctttttctgcttctgcctctgcaagctttgtataggaagccatttccttttcagctttttcattagctgaatttacttttaaatctgcttcacttttagctttatccaatatttcttgtgcttcttgtttggcatcagctataattctgtcaatcattttttgttcattacccataggagtgcttcctccttttcattttttttacttatgaattataatttataattaaccaattgcaattccattgtaagctaagaaagaaacaagtagtcctaaaagagcatatgtttcaactattgctgcaaatgttatagctttaccaagttcttcaggtctttttgcaactattccaactcctgctgctgctgctttaccttgtgctatacctgatactaaaccaactaaaccaattggaagtcctgccataagaagttgtaaaccttgagctgatgttggtattgcatctccaccaataatccctgcttttgataaaataaggaaagctatgataaatccatacagaccttgtgtaccaggaagaagttgtaaaactagaagttgaccgaatttactagggtcttctgttacaacacctgctgcggcttgacctgctattgaagtacctttagcagaacccatacctgcaaataatgctgctatagcagctcctgatattgccaaaaattgaccatttcctaacgcgtttaaaaattccatatttacatctcctttttattaatgcttgtatattttgttttatacttaaacggaacaaaaggaactcctccgccttcataaaacttattgaaaaattctacatactgtaacctacttgtatgaacatatgcacctagtgcatttataagaaggtttattgtgtgtcctacaacaccgattacaactgcaagtatcggaccagctatagcccctaaaaggttgataacttgtgctataactcctgttgttaaacaaagcgccataattcttgtataagataatatatcagcaaaataacttgttatgccatagagacttgaaaatcctttaaaaagcttaacaggaatacctttaaagcttcttccttgagtaagtacaagacctatagcacctataattgctaaatattttcctacttctgaaaatacacctatgtcccctgcaacaaaaggtattataagtagacatacacctgttatacacaaataccaaaaacctatgtcaaagattgcatctattacctttccacttcttattaatgtatatgcttttattcccaaacctacatatatatggataataccgaacagtaacgacattcccataagtgtcataacatcctctaaaggattaattaatgcttttataggaattaaatcccccaaaatacccccgaatataagaccccatacagtagttgaaactccacagataccaataagtttaattaaatttccttcacctttttgtatctttaatttatatacaacaaatccacagactactgcaattattaacccatatgcggcgtcacttagcatcattccaaagaatacaacaaagaagaaagttaaaattgtatttgggtcaatatcttttgtacttggatagctgtacatgttagttacactttcaaaaggtgttactaatttattgttttcaagcagaattgggaagccttcttctttacttccttcttcagtctgaacacaacaatcaaacttttctgtaatttctttaattaattcatctgcccttttgcttggtaaccaaccattaagacagaatgttgtttttgttttgacaagtctctctataatctttttttggtctctttctatagtgtaaaaatcatataggttttcaagcatgtgtatactatctgcatgtcttttaatttcctctgttttgtccttagaaacgttttcctgcctaattatcatttcattgtatttcttgatagcttgtaacggtgtaccttcttcatttggtaatgaaaccactgaaaaattaaattcttttaaaacttctaaaacatcatcaaaagtttcttttaaagtaattaaataaacatagttcattaacttgtcagaattgacaatcccaataacactttctggtatttcatcttctaattttactcttaaagcatcaatatttgcgcttatgggcacagttccaagtatagtttttgtatacttagtttccatattttcaagaggaatatcaaagttcacccatggttctaacatacttttattgttgttaagtaagtttatgttagaccttattgtacctatctccttgtgcaaattgtttaactccagagcttcagcataaacttgcccttctttttcactatcaattttgttaaactctctttttggtgcaagtagggattttttttgtttcactagtgaagaaacaatattaattgcttggtttacatgagacattttctgctctagcattataacttcagattcttcactatcttttacaagataattttttaattcctcctcctcagtaagaaaggcactatcatcaatctgaacaaacccacggttcataagtagctttaaaatctggcttttttgagcttctaagccaacaatagatattttgttcatattaactattgccatattatctcactacctttccaataaccgcttcaatagccttactttttctttcttcagcagttttttcaattttcagacattcacttttagcattagctaagattttatcaacctctgctctactgtcggtgactgccttctcaataagagtttcttccataagctttgcttgttttcttacatcagcaaatatgctttcacatttgtttacagcatcagctctgatagactctgcatcagtaacagcttttactttgatactgtctgctgtctgctctgcctcaacaatgctttttattatttcaaaagccatccaaatcacctctcttacctttttactatgtatataaccaattagatttttttattctaattagattactacctcattgttaaagtataaacagcatttttatataataattaatatttttcaacgtttatttcttaataaaacatattttagaatagtacttgcctagatttacatccttttttgacttacttttagactatgacatgagtatggtttttaaataccattattttcaataattataatttaaagcgatatagtttgtcaatagcgttattttgttttaaaattaacgctatgtcgacattttaaatttttattttattttttttataattttaatttaatttattacatataaaagttttttatattctttttcaacctctaacccttgaagtttattgttttttttgaatttttagaaatatctcgcactattttatctaacttttataaatcatcaagctatatcgatttttgtcaccttattttcaatctaaattttttatatatagttagaaataaatcaatatttttaaagattgataaaacttacacttagttctaatagttttattttaaggcaatgtattaatcttaagtagataatatcattagttactctatatattcgacaacattataaaaaaatcctcgtaccaatcactccaatcttcaataggatatgctgctcctccatttacacttttcagtaggtttgatgtatattcttctcccatggaaaaaagttcccctactgttatatcataacctctagatgtaacaaccttacaaaatgaatccataacatcacgttgttctcttgtttttataagttcctttctaaattcatcatcattcttagcttcttctaaaattttagttaatttttcattcattatgtatttctccttttaagtagtctttctgtaaacttcaataagctttatataaaaaggaagccatcctaaataaactaagatgacttcgcttaactgttagcaacacatttactagtataaaataattggtgtacctggttctatattttcatatattttctttgccttagaaaaaggtgtatttacacatccatgtgaacctgaagacttatatatacctccaccaaaagaatttctccaagtagcatcatgaatgcctatgttcccattaaatggaagccaataacttacaggtgaactgtaaccttgaccagttaatgaaacatttctagccttataattaagaggatatatacctgatggtgtagcaaatcctctagctaaatcgcctgttacaacatctgttgatacaagcatttctccatttttaaagaaccacatatgttggccagaaagactaatctctacatatgtatttccaatatcatctttattacgagatacagctttttgtatgtaaataggttctcttgtaacatttttaccagcttttacaacatcaactaatgcttcagcttctttctttttatctatcaaccaaccataaattccacctgaaattgtaatatctttacctgtggcagttttaaatggtcttgagtcaccaaaagtactgtattttttacttaaacttcttgtatattctaccatagcatcattatcaaaagttatgtcataattcttttctgagtctacttttaaccatttattaatttcagaaccatctaaagtttccttacggtcactaaaatcatatgtaacgactacaccaacatacttatctaatgtcttaatagcttgtttcaacttttctgaatcctttgtgttgtttggtgcttcataaactttactttcatccagagaaatagaagtattcccagaattaattgagttttgtactaacttataaaaatcatcttttttcactttgtttccaagtacctctggtactataacataagcgtttttagtgctatcatacttaggataagcactcttaggttctacaacatttttactatcaaaacaagataaagcattaaaccttttttctagtaaatctttattatatgaaagagttatcatattattatactctttagatttaaatattccaccaatccatccaatagcgctttgactatcttttatcttttgaactttatcatctggtgtaaattttaaatcaatatcttttgcttttatttgttctttcttattgtttctttcctctaagtttaaagtataggaattagtactagatgttaacaaatcatttacttgctcaactgtttttcctgaagcctttacgccattaatagtcgttccaaagtaaaaatgatttctaaaaaagattgccattcctatataagctacaaacaaaacacctacaactatagctatcttaaattttagatttttttgtccactttcttgttttacctcttttccatcaatcataattaaatccttccttacattgtaattacctatgtactttattggtttttaaacaaaaccatgtatgccttattttatatacccaaattactgtatcattgtttatatttttaaatatatagttatttccataaaaccattttatcttttagacaaaatgactattataaatcacccctttcaaaatcccttaaatacaatctctgctatattaatatattaccatacttttaataatcgtgggttatctatctgtttttgtaacactaaactactcttttaaaaaagaaactaattttatgttagtttctttatcttaacttatttttatattgaattttagcttaacataacgttgttatatagattctatttaattattttagtttctatatcttttccatcagcatattctttaagtaactccttagcatatccaaaatattcttcaatatcagattcttgactaaaagaaaatatacaaattaatatttcatttgcatcttctgttatcattgctctttcagaatcactagttggactcccaaatttacccactgaatcagacaatataggaagattttctatatttattaattctttcccaatacccttatactgttctccttcatctcctacagtaaaacatactggtgaatgtaatttgcttacattatatgtacctactggatataatgattttattgatattaaattgtttatttctactatattatttattgtataaagacccttcccttgaataattcttctaaccaatgcttctgaagatgttctatatctacttggattttttccaagctctttataagcatttcttgcatctttaattttatctagtttcgtaatgtcttcaacttttagactttgatttatagtatcacaaaactcatttatttcattaattaatttttctgagcttttatttactgctacttttgcttgaatgcaacccaacttagcattaggccatctttccttaagtttgtcatcaatactcacatctatcatacttaaacaactcctatacactaaatttttattaaagtttttatcatctatacattatagtactattcttttgttaataacatgtttattagcaaaataaatttatttttaatataatttttataaaatacaattattttttgctttatattaaacaatacattgataaaataaaaaaacactaattatttagcagtgatttattaaaatcaaacattcataatagtgctttatataaaaattaaattttgttttaaagtaaatctaaaaaattcttagctggcattggtcgtgcaaaataaaatccttgaactaaatcacatccaaattgtttcattaactcagcttgttctttactctcaacaccttctataattacaactaaatctagtgattttgctagagacactattgattttgctatattgcgacttctctcatcatgttcaataccattaagaaaagacttatctagtttcaatatatcaattggcatatctcttaaacaactaatagaagaatatcctgtaccaaagtcatccatagaaatagaaaatccatacttcctcaactcatttaaaacattctttaaaatatttaactcattaatagccacagtttctgttatctctatttcaattaaatctgaacttagattatacatttgtattgttttattgataaattttacaatatctggttgatacaactcaactctagataaatttattgaaactggaactatctttttaccttgctttttccattcagataaatcattgcaaaccctttcaaatacaaatctcccaatttttaaaatcaacttacttttctctgctattggaataaatactgcgggacttataaaaccatgttctggatgattccatcttattagtgcttcactccctatcatttctccagttacaagtgaaaacttaggttgataatacacttcaaattgattttttaccaatgctatttttatatcatctaaaatcattgattcttcactaagcttattcctaacatcttcattataaatagcataatttatatttttacctttagcaacagacctagccatatttgctttatttacagccttttggatatctacttcaccttcttcaacaaaataaatacccacacacagagaaatttcaaatactatactcaaattactttcaatattatttcgtatactatcaatttttcttatacgtttattttttccatttttataatcacagaaaattgcaaaataatcacttgaaagtcgtgcatatacttcaccttctgttaattcttcttttaaagcttttgctatcgtaattaataaattgtcaccaaattcatatccaaaagtatcattaatcatcttaaagttattaatatcaaaatatactataatataatttaaagatggtttatctaaaagatacttactacactctctataaaatttattttgatttcctatatgggtaactttatcttcataagccaaacttaatatttctttttcattggatttttttatataaattatataaaaaataattgcaataaatattaatataataaataacactgcatatatagctctgttgattatttgttctgaattactaaatacaacagtttctggaattgaaaaaatcaaattccaatcttttatataattattttcactattcccattatccatagtagcatatcctaaatatcttctttcttccaacatatttaatacagttgcacctgttttattttcttgcaattctttttttaatctatttatttctcgaatatcattatcctgttttaacaatttataaatattttttgataggctatcctcttgcggatgaaggataattgtaccatcatttcttacaacataagatatactattattttcataaaaagatacattaataagtttcatcagagtattgatattgtaagtacaatataaaactccaactactttatcattatttaataatggtactgaaatagtaatcttctttatagacttatttacttcatcaacatatggacttgaaacatacttcttacctttaattgagtttttgaaaaattctctatctttcactgaaaacttatcacctttggtattttcagcattaccatttatatcaactattgccatagtgtaaaatttttgattttccatttcatctaaaagatttttcattttttcctcattaggtatatcttgatttaaagcataatagttagaaaaaatatttaaaacatctaaatctttttcaatttgtctttgtgctagttgagagccttgtactgcaacttcttttatatgtatttttgcctctgacataagaagatgttttgtatcttctatatagatataccccattgtcaaaaataatgatgttaaaaaaagaattgtaattaatgtaaaacttttatttctccctgtcattcgactcctcccctaattagtcaatacttcatatagataatatatcctttttataccgattcatcatttatattgtatataactattcttaaatgttacacataaaatcaacctaataaccataaaaacattcttttattatcataataacactatttagttgaattttaaattaaagaataaaaactatcaatttttctaaacaaaaaaactcttatacaataaaactttgttttatgtataagagtttttattttatctattttatagtaaatttatcttccataatatgaatttaaatacatatcttttatttcattcataagtggatatcttggatttgctcctgtacattggtcatcaaatgcttgaatcaccatttcatctattgaatccataaacttaggttcttcaactccaaactcttttatagatttaggaataccaactttaagttttaaatcttcaatagctaccaataaactttggaatttctcttcatcagaatttccctttaatcctaaaaatgaagctatttcagcatatctttttaatgcttctggatatttatattgagagaatgctcccattttctttggtgcatctgaagaattaaatttcataacttctgttatcaaaagagcatttgcaacaccatgtggtacatggtggaaagcacctaatttatgagccatagagtgacaaacacccaaaaatgcatttgcaaaagccatacctgccattgtagaagcatttgccattttttctctagcttctgggtcttttgcaccattatcatatgcacgtggaagatattcaaatatactcttaatggcttgtaaagctaatccatttgtataatcagttgcaagcatagatacatatgcttctaatgcatgagttaatgcatctataccagaagcagatgttaagctttttggcatattcatcatcatatcagaatcaactatagccatatttggcatcagttcataatctgctaatggatattttacccctgtatcttggtcagttataacagcaaatggtgttacttctgaaccagtacctgctgatgttggtatagctacaaaattagctttttcacccattttagggaatgtatataccctttttcttatatccataaatctcatagctaggtcttggaaatctacatctggatgctcatacaatgtccacattatctttcctgcatccattgcacttcctccacctatagatattattacatctggattaaattctctcatagctttagcgcctatcttagcacattccaaagttgggtctggttctacttcaaagaatgtagtgtgcttaatattcatttcatctaataaatcagtaactgctttagtatatccattattgtaaaggaatgtatctgttacaataaaagctctcttcttattcattacatctttaagttcttttaatgctacccctaaacaaccttttttgaaataaacttttcctggtgatctaaaccaaagcatattttctctcctctcagctactgttttaatattaagtaaatgcttaactcctacattttcagatactgaatttccaccccaagacccacatcctaaagtaagagaaggagctagtttaaaattatataagtcccctataccaccttgagaagaaggagtattaattaaaattctacaagttttcatggctgaagtaaacttatcaagtttttctctttgatttacatcatcaatatataatgaagatgtatgcccaaatccaccatcttctactaatttttctgcttttctaactgcattatcaaaatcactggccttgtacattgcaagtactggtgaaagtttctcatgagcaaaagcttcttctatttcaactgattctacttcacctattaaaaccttagtatctactgggacttcaaagcctgcaagttttgctatagtacaagctgtttgcccaactattttagaatttaatcctccatttactaaaattatatttcttattttttctgtttcatctttatctaataaataagcaccacgctctttaaattcttttttgacttcattgtatatattttctaatactataaccgattgttcagaagcacatatcataccattgtcaaaagtcttagatacaagaattgagtttacagcagtttttatatctgcactctcatcaattattgctggagtattacctgcaccaactccaatagctggttttccagatgaatatgctgatttaaccattccaggacctcctgtagcaagggtcaaatccacttctttcataacagttgtagttaattctaaagatggctcatctatccatcctattatgccttcaggagctccagctaaaacagcagcctcaagaacaacttttgcagcctctatagtagaattttttgctcttggatgcggagagaaaattattccatttctagtttttaaagctaaaagtgctttaaagatagcagtagaagttggattagttgtaggtacaactgctgcaataacacctattggctcagcaattttagtcataccaaatgcttcgtctttctctataacaccacaagttttagtttctttatatgcattatatatatactctgaggcataatgattctttataaccttatcttcagcaattcccataccagtttccttttgtgccattatagctagaggaactctttgcttattagctgccaaagatgctgctaaaaaaattttatctacctgctcttgagtatatgtagcaaatattttttgagcttctctgatttttgctagttttttaactaagctttcaacgttatttacagtatctaaaccaactgacataacttcattttcttttttattttctattattacttgttctttatgagccattttaacaacctcctgagatagttttttatttattatgttaatttattaacattatagcatttactttttctattttcaagttatttttttaacattttattttttatctaatataacatcatttctactaataatatctagctttacaaatacttaatttaactagatatcactttattttttacgcaaatcactaataaaatcatctaaaaacttaaggataacgttatttttttaacgtttatatttttgtattttttgcaaataaaactttataaaaagaatttttaatatgatattctatcaagtttaaaaataaaaatacttgaaaatgaaaataataacttgattaacaagttaaagtaaatatagttaaatgtacaaacatttacaacatatagtataattaaaaaaatatatattcatgatttttatatactatgaaataaaatatatttaatattatatagataaatttgaagtttataagaaggaggataagcatgaaaaaattaaaaacaattagcattttttctttgattataagtgtaattttaacgattggaggtattggaatagtaacttattatgtagataatttgtttattagaggactatcagtatttgttttaattatgtcctcttcttttgtatcaacaacagttagattgatatttgaagagtcaaaacgatataaattctaatttaaaaattggattaagtaaataattttaatataccaaaaattacggagattagctcaaaatagactttttagttcatgatgcatttttttgtatgaaattaaatatattttcatcatttcaacaatgaaaaagaggcttctctctattttgagacagcctctttgctagtattgtatctaatacataatattataagaaccaattctattgatgtggactttttataacaggctgtagctgtttgttctctagagcaagttctatagttggaattattagctcagtatgtgcaatcatagaattaggctttgctttgcaattatcttgaccaaaaggtacaaaatatatatttttagaattaaggagaataccaatatttttgaaattaaagcttagagcatcattcgttgatattgatattactagtggtttatcattacgaagatgaccttttgctgccattaatactggtgaatctgtaataccatttgctaattttgcagcagtatttccagtacaaggagctattattataatatcagcaatccctttaggtccaaatggttctgcctcttcaatcgtaactataggtttatttcctgtaagttcatatgcttttttcataaactcttcagaatttccaaatctacaatcgatattttgtgatacatctgaaaatatagtgtgtacattagctccttctttaaccaaattctctaactctataaatattttatcataagtacaaaacgaaccagtaaatcctactccaattgtaagtccttcaagtctcatttctaatcccttctttcatttataatattttctatagcgttaacaagaatctcaccagatgtctttggtgaatatttaccaggaagcccaaggcaaagagtcgcattaatccctacttctttaacaacagaataatctactcctccaggagaagaagctatatctataatagttacttcttgtgatactttttctaatctttctttcgttaaaatacactctggtatggtgttaaaaatataatcaaattgtaaaagtttttcatcaagttgacttaaagaaatactggaatatccaaatgcattagccgtacttcttgcatcattatttcttgcaccaacgcatacatttgcatccaaagcgtataatttttttgcaagtatttgtgcacatcttccataacctaatactaaacagttactttgatgtatattgattatacttcttttaatagcttctgctatagccccttcagctgtagcaactgcatttaaaatagcaacatcattcattttcataaaatcataaatctgaatagagtgttgctcgcaaaatttacaaactttagttggtatgttacctccaaataatatttgattaggagataaattaattagcaagttatcaatagtagcatcaagacaatcatccgtattttcaatattaacttgattctttgtaaatggaattggacataaaataatggaacttttggatagtgcttcagctagtgaagttgattttccaacgattccatttataatttcatttgatatcccataagtgactacagaataccctttattaattagtttttttaccatgtacacttgtcgcaggtctcccccaataacagttatatcgtattgatttgacatattgtaagcctcctttactatatacaatatgtttttatcaatacattggttcactaaaattactaaatattatacttataacatttttaataatgctaatctatctatcttttcagaagaggtatatggaaatgaatttaaaaagataattttctttgggatttcatttttcattagattatctttcattttaatcaacaaatctttcttcgtaattttgtctatagttattacaaataatacaatttgatttcctcttatagtgtctgagtacggcaatacaattgcatcttcaatttgaggaatttttttaacttcattttcaatcttagcagaactaactttaaatcctccaatatttacaatgtcatcacttcttccttcaaatattaagtatccatcattatcataatatccaatatcattgacagaataaggtttggttgcattatatactgcatattctgtattcacaaaaatttttcctcctctaatatatatatctattcctggaaatggtctgcctacacttagaggtttttcaattagttcatcatagcataaatatgtaatataatttaattcacttgccccatagtataaaataatttcagactttggcatatatttttttagatttcttgcagtatattcaaataataattgagaccctgtaaaaatacttactactttgagtactggttcttttaagtgtttaaccaaaagttgaagttttgtaggtataaggtatatgttagttacattatattgttttattgtccttatccatgatttacaattaagacctgaacttattacaatactacctccttcatataatactgacattatagaatttagattccctgtaaaactaagtgttccattaacaaacaagattgattccccagagatattaaaaataccattttgtataggaaaaaatccagcccaactctcatatgttctatataatacctttggaacacttgtagaacctgaagataaagctcccatacaaatacttttatctaaataatttataaggttcttatattgatacatatatagattaaatttaggattaaaaatagaaaaattaactttttttgctacttcattattgttatcatcatataaatcaataacgtccatagattcatcagatataatgattgaaatattattttttaataaaatatcatctaatacttttttagaaagattataatgacaaataataggaatattttttgaataattaatagcaaaaaaactaatcaactgaaacattatatttttagaatatattaaaattgagatattttcacctaaagaaatttgttttcctagttgctcactataacttaatatattttcataagtatatttttctccatctataattaaaaaatttttatttttatgcctctctttttttattcttaaaagttcataatagttcataatctacaccctttcaagcagtaaagctgaacctagaccaccagctgcagctatagagcaaattccatatctacccttagttttttctaatgcttttaaaagatgtaatgtaataattgcacctgaagcaccatatggatgtccatacgctaaagctccaccaaatatattatatctctctattaactctggatactttctttgaaacaacacatctataactgcaaatgcttcattaaattcaacagcagatacatctaaataattaaggctttctatctctaaaagtttatccattgcttgtatcgctgatgttggacttaaggttgcatctgttcctattgtgcatgtattaataatttttgttttaggcttcttttttacatgttctaaatacttcttagaacatattataataaatgaagctccatcattaataagacatgaatttgctgcatttgtaatagtttcttttcctaaaattggtggcatcctatctaataacctttgactcatcttatcacgtataccttcatcataggtactattatttataggagatataatatcctcaagtattttttcttctcttgcttcttttgctcttttatgactttcctttacccaaaaatccaagtctgctctctcaatttgatataactctgctactctttccgccccttcgagcatactattttgactattatcatcaggagaaaattgagcaactgtataatttggattatttgtattatatcgcttatcattcttatgatatgtgcgcattggttgtagagaactactttcaaaaccacctgcaataattaaattacactgaccagatttaacctttgaaaaagctatgtctatactcatcatagcagaagcacactgcatatccacagtaaaagcaggtacttcatttgacactcctgctgttaaagtcattaatctggctatattccctcctgtcccaactgcatttccacatataatctcatcaattttgtcaatttcatactttttaattaaatcttttaaaacacttgctcctagtaattcaggttgaacaaattgaaaaattccattttttagacctatatgacttctcaatcctcctaatataaaaacttccttcatacattacacccttccttatattatagatttatcatagatttcttctgagtacattgttcagtttagtgcctaaaaaagatgcaataaccgactttattgtatctccaattaaaaatggtactactgctgcaaaaagtgctgcttctactgtcatttgattaaaatagcacataaatactgttcccataaaatatataataggcattccaacaaaaattgttattagtatatatctcttaatatcattatttcgtccttttaataaactaataattagtgctgcaaacaaaaacccaaaataaaaaccacctgttgggcttaacaactttccaataccagatgtacctccaccaaatactggaatcccaattaaacctatcattatatatacaccaactgtactaaatgcttgtcttggtgttaaaatcaaagctatcaaatttatcattattgtttgtgctgttactcctgctggagtaaatggcaatggtatatatatgtaagatgatatacacaataatgctacacatattgacattttagttaaatcttgaatatttactttagtatttttcatttttataattcccttcatatgtcttatttcatttagtttatatgtacatatacaaagcctctattaaagctttgttttagtataaaataaagacgtttttttgtcaaccattacaagtatttaggtttacgtttaatttataagtaaactttatactgttactttatattttaatagtcatttataaaactttgcttaaaaacagctctatttagactatacttgtaaattataatatgatatatttttatataagattttattttatataaaaaatagtaacaaatagtttatacacaagatatttaaaaggaagtgatgatatgaaagttaatgaaaataatataaataatatagatgaagagttagatgaacttagtaggaaagtttacttagagtcaccagatttttggataagtatttctgacaaaataatagataaagtatttgatgaaatgttattattttttgcagttaaatataactatttcaatatagtatgctttgctattgaaaacaattatctggatttaaacatgccttcaaaaaacaaaaaatacactaatataatggagcatttgttagatacatcaaaacagaatgaagataaaaaaatttataattatcttctaagcttaaataaaggtaataacctagatgaaagaccaattttagatgaattaaactgtaatattagtagtgatacttttgaaaaaaaagatatatatcttccaaagtacttatgtccaagttgtaattctaatatatttgatacaggttataaagtatcaaatgacataacatataaattttcttctaaagaagctgaacctattgaaatgtctagtgaagtttcttctatcagatgttgtaattgtgatgaattattagaagatattacacttaataaactatataacctatgtaaaattcaaaactgtaataattgtggttctaatttaactaaggtaggaattattgcaaagaaaaaaatgaactttgatgagaatactgaaaaatttaaagatgtctcaacatcttactgttgtggaaattgtgactctgaaataaacttatctcaaagagaacattttaagatttaaatatttataggctaaagtaataagattacattattagatactgtataagttttttaaatctgtaaaaataaatacacttataagaattaaaattgctatgaaactagttcttgctgaactaatttcatggcaattttctataatctaataattattaaattttaacaaacctttattagcattccataattattcaaaattctttcaaataccctatagtttataggtgaaagtatctttaatattatatcaaacttattatctttaaatagtaaatttgttaaatctgaaatacaccatacaattttattttcctcttttgtagctatatcaattctgattaacttacatctataataaatatctttatcttcatatagtctattttaaaaattactcttataaaaatcaaatagaaaataaattaattattcttttaatagaatgtaatcatattatttactatattccattatgtactctttaaatcctgaatcttcatttacttgttcttttactatattaaaaccttttttattataaaacacaactgcttttttattatctttatatactgctaaacttagacttttatattttttagttgcataatctaaaagtttacctccgatacctagattttggtatttgggttctataaataaagctcctataaagcttttatctattatgcttataaatccttttatttcatctccatcatcatatacaaatgtatctgatataggtatatattcgtttttaacagtattgtagttattttgccagtattctttacttataaagtcatgtgctttgattgtacttttttcccatatttccatgattttatttatgtctttattgtttaatttctttatcataaattttgtttcacctcatttttgtattgattttataatgtttataggtaagtgcattttatttagatatgatttagttaatataaggtggatgttttagtatatgctattgtttattctacaattttatatactgctttattaatataaaataagtttctaaatactcgttgatattgctaatattctacttatctaccacttagttgatataaaacctgacactgtgtcttgtgtgagtcttttctttatcctatttacataccacttagttaatataaaacgattaagcccagtaaaaagactcgaatctcttatcgcatttacataccacttagttaatataaaacgcaaaaaatgttgatattcccaaaattaatattgatgaatttacataccacttagttaatataaaacattatagaagtacatatattgctgaaaaacctcttgtatttacataccacttagttaatataaaacagttagtgatatcaatatgctaagcaatatttttacaatttacataccacttagttaatataaaactttatatttcgtcgcacggattcgtgcgaagggttggatttacataccacttagttaatataaaactaatttagttatatccatttgtttaacccaattagtatttacataccacttagttaatataaaacgtttcattttgcactatatcaagcttagtatacaatgatttacataccacttagttaatataaaacttttatatttaattttaaagattaaaggtataaacaaatttacataccacttagttaatataaaactactagaattattaaatgaaatgaacaataatattgtatttacataccacttagttaatataaaacgatttaaatgcaacacaaattataacatctaagaatatttacataccacttagttaatataaaacaagattgaaatttcaacactttcaccttgtatatctatttacataccacttagttaatataaaacaggttaaaaagcaatataaaagattgcatggaattactatttacataccacttagttaatataaaacaagtctcaataacaacagtcgaagcagaaaaatccggatttacataccacttagttaatataaaacgtaaaatgagaaataaaagtaaacaaaaaggtttagtatttacataccacttagttaatataaaacctgaaaccctcggatttagtaaccgattctatgtcgagtctatttacataccacttagttaatataaaacaatctaaaatatgttcgttaaaagggagtgtgtaattaatttacataccacttagttaatataaaacgtttcttatacaactcttaactccaagcccattttggaatttacataccacttagttaatataaaacgtataaaaaaagagttagaagcattagacaaatggaatttacataccacttagttaatataaaactataattgggatggtcaggtttctgataaggttaataaatttacataccacttagttaatataaaactgttttttagttttcgtgattcaaatggttctttgttatttacataccacttagttaatataaaacaactcatgtaacaagtattaagacttgcacctttaaatttacataccacttagttaatataaaacttcattaattcctttcatagcacttaagttaaccaaatttacataccacttagttaatataaaacctttagttgttgtcgcttttgcttctactatagttgcttatttacataccacttagttaatataaaaccccaaaataggtataattgaatacattgaaaatacttcaatcaagcaattataattcaataaaaacatcaaaatttgcagtgagcgagcagtagtgcaattgataacagttatcatacaccttcaatcccttatattccaactgttaacacctattttagcataaatatcgctcactgcaaacctatataaacatttcatcagaatacttatcaatcccataacatttctttttaattgaattaggattttttatctcataaacatagattgaatcctcgctattatcaataatattttctatttcagaaatacatttatgtaactttccatcagtaatattgccttcaaaaacagaattttgcgtccaagtcaaatattttctaagtatccttctaattctatttaacgaccttgcttcaacaatatcataagtaacaataacaaacatacttaccaccacacctttaaaactttgtacctttcatcatttataaaatgtttaattaatttataacactctaaccttataaacattctatatgaaacttttctatttagatttctatgttttatagttgtctgcatcttattttcaaattcttgcaaaaatttcttctttcctttttcacttaaataacaaattttgtcttgatattcaaaatcattcttattaattcttttattattaatcaggctaaaaattattgtgtcaactataattggcttaaaaatttctgcaatatctaaacttaaagaaaatctctttgttgatggttcatgtaaaaagcttattgtagggtcaagttgtgtcttatatatctcacttaaaacattcgtatacattatgctatttccaaaagacataagagtatttactgggtctttgggaggtcttttttctcttttataaaattcaaaatcatcttttaatatttgattaaatgatttatagtatgtttttcttattctgccttctttacccataagttctgatatttctttgacatcattcaaatcatttagttcatcctttatagtatcaattaaactttcatcaactttgtaatatctcatatttcttaaaatatggtatgatgcactttccacaaaggattttgctaagtataatctttcatttttatctaaatagcaggctgattgacatactaaactgaatcctgatacatttttcttccttggataatatgtacctgaataatatccatagtaattgtagaaatgaagcatcaccccatatttacttatgtaatttataagttttgtgtttaaatctacttctccatatatatgaatatcatcaacttgttctactggtaatatttttttctcaccttctaaattgtaatagtaaatcgtattttctttcctttttatatttccattacttataatataatagtctttatacattgttactcctccttcacaaaacaaaattcataataagcacattttgtacaataatgttttttctcaattttgggaggagataactgcatatttatttcatttatatttataagtgtgttttcaataattttttctttttcttctgtcaatatcaattcttcttgtttcttttccttaacataatttatagttccttttttctctatacccatactattctttaaatagtataagtaatagtataactgcatttcatctgcttctttcatctttgaacttatttttacttcttttacatactcgtcctttattatatctagcttcaagatatcatcaatcaacatttctttatttttcattcttttatatgaatcttcatgtactatctttccagacaatactctactactattttgttccatagttattcctttagaaaatagccatagttttcttttacatacataataataatttatttttacgccttgaacttttaatacttctaaatctattggcacaaaatcaccttctttagtaaattttagccacattgttaatataaaaatcaaataaattggtctatttcattacttataagcacacctttaccaaatatctgttttgtatgcttattttcgtgtatatcatatttatataaaagtatttttaaatcttcaagacctttcacctgtatgtcaattacattttgtttagctttatatattggtaaatttacagtttttttaattatctctcttcttgctttttttctcttagactttattttatttatcaattgtctatcatcattactatatgcatttataagctcttgtcccaactcttcataatctttgattaaagtttcttcaattttattatatatatcctctggaattactgtatatccttcaatatttctaagtatattttgtgcatctttagaacctaaactatatggcgttatagtatctaaaatatttaaagcactggtaaatctcttttcaaaagctgtaccttctagactttctttagagtatagtatcttaaccatttctaccttatatttttctttcatcttcacacattcttttccatttataaaagttttcagtagctcaagtcctttttctacaatatccttatcataaatactacctattcctgtagctttttctgtatatataaatatatttgggctattttcttcatactcacgacttctataacatctaccaaatcgttgaaatagactgtcaagtgttgaattttctgtatgaagctcatcaaaatcaatatcaagggatgcttccactaattgtgtagtaatccaaataccattactatcactatctgcaaattcttttatatatttttctaattttgctctatcttcttgtatatacatagaatgtaaaagatttaagttgacatctattccttttggtttaactatttcttctattaactcatatttttctacagcacttttaactgtatttactattacaagaacttttttattcattccactttgtattattttacctaagttttcatctattgaattttctacaatagacacacaatgtcttattttttctgtgttacatgtcaagtcagctaagttactattcattacacctcttttttttaattcatctatatatatggttggcatagtagctgtcattatcataaatctgccacctatcttatgtatcatttctataccttttaccaatacagctgctatttctggtgaatatgcttgtatctcatctattactacttttgaatatgctaatgttgagtacactttttcatagcctctatacaaaaaaggaaatttaaatatttggtctattgtggaaaatgtcagtttacaagataataactttgctaaatctacaatctcacttgaattttcctgattactttcttctaaataatctattgctgttgaatgtaacagacctaagaatgtatcatttgcttctcctactccaattatatttttagccctatcaaataatgcatttatacttactcttaatggtagtgtaaaaaatgctttatccttatctatccaaatcaaagcagtttctgtttttcccattcctgtagatgcaatcagtattatattcttatttctattagatttagcaaatgattgagcctctctcaaactaccaaactctttcattaaataattttctgtctgttctcctatatttataacattattgcattccacaacttcatgagcagaagcactatggtctagtctatgtagtattccttttaacataatatataaattatagtacttgtgatttttatctattcttttttctacactttgtagatatactttactcaatttttctgtttttattggatatctaactttaaattcacgctgtagttcataaactttatttattaaatcttcatctaatattttttgtattaaatttttaaaatctttatctataaagatatctctttcatgatgatatacaataacttgatttaatactgctctaagttctttattttttttcctgtctatataactataatcaataaatgcaggagaaagataattatggcctacattattttctaaatgagttactattttaggttcatttattttagtatccattctgctttttattaactcttgaaacggtgaaaatgcttttccaatatcatgaaattctataacaaagtcaagtaattgccaaaatatctcttcctctagaaaatctaagctatttatattttttccataactttctcttaatacattcatttgttttaaaagttcatcagtatgttctctaagtgtttccactggattagatttagcatataacatactctccctcctaatttatattattaaaatataataaatctccttcattatctaataatatatctccaattgatatagtatttccatcctcaacataataactatctaccttattccaaaccctttttttatcttccacagcattattatcatagtaattattgagtctgtaacttataccatctatatctgtatcttgtaaacttgtttttggtatatatataggcattcttatattacattctgataacttataattttcataatcatctaattgtatatcctcatctacttcaaatttattgacttctacaaatctaatatcattaattcttactaaatcttcttttctacctaatgataagtgctcgtcataatttaataaactatcatatatttcttccaataaatcaaaatccccacctatatgaattatcaaatttacattcaatagcatatgactattcattggcatagatgtaatactatcttttttataaaaatatgttgtctggtaattattaaatatactttcatatgttccctgtacacttatattaaatggtatatattctgtagcatttaatattttgtgaattaatccatttattgtagaatatggaggcagtggatatgtctctgtaatcttcatagcaaatggttttttatagcatgcagtttcttgaaataaatctaatttcaaaaccttcatattaattcaccccataatattcctttacttctttaactagttgtccaaaaaatttatctacacttaaaaaattatcttcaaacaatcccttaaattcttctttatttataaataccccatctaccattccaacataggtaaattcttttaaatcttttcctaaaaaagtaccttgaattacttcttctatagcttgcttatttattttaaatccatttttatctccttttaatttaattctacccaagaaaaatggatttgctatttcatatactcctcctactacaaatagaggagataaattttcttgtctacctctaatatttctattcaatacttttattatttctaaaaattctactactcttctacatttctctttattatcaagttctatatctccatccttacctattttagataaatctatagtcactgtatatgtataataacttaaatgttgctctatgttagcaagattaggatgttctcctattctatctgctaatcctttattatttaaaaagtccatgtcacttctatatggctcaagggaaattgcattacttaatcttacagtagcttctctagtcaaagaacctccttttttatctttctcatcttttttatttgttttcatatatccaaataaatccatttcttctgattctcttatacttatattgtctttaaattgaatagtacctttttctttatcgacaacctgtaaattccaattaaacaattctgctgctaatcgtactatgtcatatcttaaacactggcgagatgcaaatgtatatatatttccatcatctctacttaatttttttaattctgatatattacctatcccttccccatagtttaaactttgagcctgtgctattactgtaaatgttaaccctcttttcatcttatttttcctccttttcgtttggtagtttgtcttttccttcatattttccagaaattaatccagatataaaagcatgacctatagattcaaagtctaaatctttttcaatttctatatctaaaataaatgctggaatctgtttttcagctgacataaaaactcttataattgtatccataaaatcacttttatttccgactttaactgaatttaaaagtttatagcttactccatctattttatttttagaatttttattaacaaaatagtcatgtatatcacaacctaaataataaattattctcagcttttcatcattcttctccaaatttttactatccattttatataccccctttttgtagctatttattaatgctcttaattggactactctaaaacaatctattcctgatatatttgatttgttgttgctttccatatcatttttaactttatttcttaaaatgttattagttagatgcttcaagtccctatttttcaagagtaaatctagtacatttgatttaagcttgtaatcatagatactttgtatttttttatttgcatacttgtctgtaaaaaattttgctaaataagttggaatattaaaataatttattttacattttttagaatctatacttgctttaaattccacaaaaagtatattacgaagttgccattcactttttaatgtattttcttctactatactttttataagctgattaaaaggattttcatctttggaatctgaatattcacttttttgagcttttaaactattatttctttcaaaaagctcatttatagaagtatccatgttaacaaataaataaaactcattttcttcattaattaaataattctttcttgtataagtagcccctgctggagtacagaacaatattagcttacaaatatcacatattgatggtacatacgcctgattccaaaacatattcctagcattattggtgcttactccaagtggagcaaaattactttctgagtattcatctaatattcccttatataaaccacacatttcacatacttctaaactatccatatactcttttatatcttctatgcttttatttttctttataaagtttttatttatttccttcataattttttctatagtatttatactagacttactaacttttttttcatttatatccttagctatactatttaatctatcatttaaatagtttttcaacttatcatagtcattctcttctaataaatctgctaactctccaaaatatataatttgtcttaaataatcattaaacattatctgttttaatccatctaaatctaatttcgccttagcaacattaaaaaaactaacttgtccaaaataattatcttgaactacatatttataaagatttgctgtaagcctgtcatttattgattttattttaaatatatctatagtctcatctactaaagcttctaaactgtcaaattcatcataactttttatcttagacatgctatctagcttctcttttatcaggttaaatttttcttcatcaaattttttaatcttatcattttgttgtttcacactatctttaattttcttaattccatctttgattctatcaggcttagatttaataaaatttatactgtaatcaatattttttttaattctttttgatacatcatattcatccataaagtaattaaaataatactcatgaaagttttcaagaaataagctatcaaattcgatataatcttccataataaatatttcagcttgtttatctgctttctttattatatttaaaaatccaactatacccatattaaaaaaccaatctcctctataaactcttaacttcatttatctcacctccattctaaaatatctacatctccaaatccctgagcacgtctaaaaccaattcctagattgtagataagatttaaatcatcaatatcacctttcaatataaatttacctttgtaaccattaatatattgatactctttacctgttatttttttaaattctcttaagctctctttaactactatctttttgagacctatattttcaaattctaactttctttttaatccatttcccctataatttttaaccacttcattagttatatagtttagttcttctatgtatctatcatcagttatctccaagaattttccttctttagactttacacagattggagacaatgcattaaatagtaccctttcttctgttaccttcttttctcttgataaatcgattctaattcttgtaagttcataggctttatataaacattttttagaagtcattaacccattgtatatatgaaaacccaattctaaatctggagtacttatatttaatattactttatcttctataataaaattgtcaccttcaatactatacttttttatataaaccgaaaatgtaaaatttttagtttttttattattcttttctttataatagtacatgtttttatagtaatcttcattagattttcttattgcttcttttataatactcataaagagcgaattataagatattggtatacaacctgtactaaattcaattttcattttcataatatcacctctctcaattaatatattaacactagaccgtgaagtatattggtccaagtataaattatttgaaaaaatcagtaaatttttttcattttttcaatctctgacaatatatcatttctaagtctatctggttctacaacctcaacataagctcccatacttaaaatccaactttttatctcctcataacctctcattttagctttaaacattatagatttatcatcatattctatgatttgttgattattaacccaaactttttcctttataattattgaaaatggatgactaatttttataacaacattaatttcttctcctttataaattcctatactatttttactatattcatcccaactaaaacttttatctacattatatttttcttctaaaaccttataatctttaattctacataatttaaagtctataaacttaaatcttttttcacaaaaagctaccatataagtatctgatttataattaaataaaccatatggatgaacaattctttcactatttcctgaatttaatgaataatattctatccaaaatttgtgttttgtggtatatgctctaattatttcattacacttatttttttcagacttataatcacaattacgttgtgcttgaactgtaaaataatccatatatgtatcgcttttttctcctgtatttaatactgcttttattttttctacaatattattaaattcatttttgtaaatatcattattatactctaactgtgaatttatcatatctagaattgaaacttcactatctaataatttaattaatgatatgctattacatttatctatttcataaccaccataaatcccaggtgttgaatttataaatataccagcttgctctaaatacatcttgtaactttttatttgcctttcacttacttccaactcttctgataattctttgcatttcattttgcctctgctttgaattaatatcatcattctaagtgtattagctaatttactaatgagtaaccccccctaataacattaattgatatttttattatttatttctacacatatgtacatataacctctttatattttatataagtagaatttttttataattttgacatttaccatattatattttatatttgtacaaaattttaatagttaatacaataaaaaatattactgaaaaaataaacatctataattccagtaatattaattaattttaaaccctttttattatcatttaataatagtaactaaaaattgactaaatttaaccttatctcttttaaataattatttcttacaattaaaaaataaactatttgaaccaagaacaagcttcccattaccaaaacagctgatgatgctacttctatatcaaaagaatttttcagtgcagtaagggcaaatattgaatgtataacagccactacataaggaaacaaaaatactattccaatctcaattgttgaagcttttttaatctcattatatgtcatccccaatttatttaattgctcatactttttcttatcaacttggcaatccatataaaatttattatataaaaaactacttgtagtaacaaagaaaattaaacctataaatattgctaaaaatataaatgtagaatatattaatttcccagttcctatcattaattctttagagaaaaacaaatatggttgcatccctgactcattattaaatttattttcaaattctctgcatatctctatagttttacttgaatcctctacttcaaatgcagtaaatctatccactataaattttgattctatactatcataaaaattatcctttaccacatacatatttttgtaatatgctggcataacacattcttccacttgttttgccacctttaaacctctattccctacaataatattttctttgacgttattatttcctggtaaacttgatgataataatgatatgcattcattatcttcaaaacttataggcttaacccctatagtttctgtaatttctaagtacttagattctttcataattctgacattaaaatcacttttcttgggaaatacagttttaaattcaccattagtccttgtatagtctacattctctttttttagattattttctataaacatcattctttccttgtctttttctttgctatcaggctttttagggtcattatgcaatgtcattgttgaataatatattgtgttaggatatattaaattaatttgacgctctacatctttccaaaaggaataaactgtacctatagcagtaaatgctactgcagaagttatagttatcaagaaaaatattctagcattatcctttaccttataaatcaagttcgaaatccaaagcatatttgtattttttctataaaatctcttgtttagttttagcttcttcataaaaaatacactaaattgagaaaagaacaagtaagttgctactatagtaagggatgtaactggaactaagcgcagatatgttgtatattggtcggttgaggtaatagcattataatacgctattataaacaaacaaatacttaatatagcaagcattagtgatgttttaggctctggttttggagtttttgtacctttaagtaacttcaacacctgattttctttaactataaaataagtaaatattgatgttaatacagctaaaatcataaaatagattaaagtagacaatatcgcattaaatggtatatagaattttaatggcgataattctaaaaaagtagacataaccactaaaaatatctttgcaaagattaagcctattattattccaattacagaagatactatatttattatcatattttctataaagattaatttcattacttggcgttttgatatacctgtaatataaagtattccaaattctttatatctacttttaagaaacacactaactgaataaaacacaaagaagaataagaatagatatgcaattatcttactcatcttgagaccttcttttaaataatcaggaaattgagatacatctaaatctggatgacttgtaaacataataaaagaaaatagcagtgaagatgatataacaatacttgctaagtatcctaaatacgctttaatatttcttgaaatattgttaatagcaaactgttttatattcattagttatcgcctcccaataatgtaagtacatccattatctcttgataaaactgctctctactactacccttatatatttcattatatatagacccatcttttatgaataagattctactacagtagctcgctgctaatgggtcatgagttaccatcatagtagtaactttattttctttatttatcttttgaaatagctccattacaacctttgatgactttgaatctaaattacctgttggttcatctgctaaaagtattgatggattgttaatcaatgctctagcaatagcagtcctctgagcttgaccacctgatacttcaaaagttctttttcctaataaatcttttatacctaatattgtagatacttcattcaatctctcatcttgctcttttacactgaccttatctaatgtcaatggcaatactatattttctcctatagttaatgtatccaataaattaaaatcctgaaatacaaaacctaactctcttcttctaaataatgcaagttcctcacctcttaacaataaaggattctttccctttaattccatagttcctgtagttggcttgtcaatagtagaaatcatatttaaaagagtagtttttccactaccagatggacccataattcctacaaattctccatcttctatactaaaatttatgtcatttaatgcgttgaaaattatttttttaccatatactttacttaaattatttacagttaaaattttcattatttaactatccttcctaatttaatttttgaaataacatatatataattgttaattataatttatcttagtttaatttttatagataataaatctattttttctatacactaattatgttagtaaaagctaatactgcaagtactacacccatgattattctgtatacagcaaacactctcattggttttttctttaaaaaattcacgaatttttccataactattattgatacaataaaagctactataaacccaactaccaaagcaatccacaatgttggtgtcattattgaataatcaaattcaaataaatcttttcctgaagaagccaccatagctggtactgctaaaaagaaagaaaactcagctgctgtaggagaattaagtcctgctatccatccacccataatagtagatgcactccttgacatacctggccatgcagacaaaacttgtaatgtcccaacctttaaagcttgtattggagtaattttatctatattatctgttgaatgattcttttttctaaacaaagtttctactactaataataaaatcccacccactataaatcctataattacagattgtaaattaaacaatgattttatattatcataaaatagaactcctataatcgcaaatggtatacaacctataattacattcattccaaatctaaaaccaatctttccttcttttccgccagtaaatataaatttaaaaaattctataacgctatcttttatctttttccaataaagtactactactgctaatatagccccaagttgtattacaacctcaaacatttcagcaaattgccccttaaaatctattaaattaccaaccaaaatcatatgacctgtagatgaaactggaataaattctgtaaacccctctactatagctattatgactgatttcaatataaaaataacatctaaactcatcaataaacatccttccttttttacaaaatttctttttttatgttatttctctcatgttatttcttatattaattgtaatttagattagaaaatttaactatctgcaaacattacacaaaccttacatctatgtaaggtttgcaaataaactctcttaaattttgattatttaactatgaatatttcatttaataaattgtataataaaaaagtacaattaactaaaaaccctattgtaacagataatttacatctttatcaaactatttacatctttattaaagtagattgaaacttctgtaccttttcctacttctgattttatacttactttatgacctaaatcatcacataccttttttactagataaagacccatacctgtagattctccaaacttacgaccattttctcctgtaaaaaatgggtcaaataccctttttaaatctttagaaacaattccaattccttcatctattatacttaaaattacatatttattattttcttcagattttatagttaggtagttactataatctttagaatatttcactccatttgtaattaattgacctattataaatttcatccattttacatctgtataaacataagtaaatttgtctacttgaatcttaggaatcattccactttttataaataaccttttttcttcatttacaatactagatacaatttcatttaatttggctttttcaactataaagtctttctgaaaattatctgcccttgcaaaatgcatagccatatctaaccctttatttaatctatctatttcttttcttatattttcagttacttcttctccctcataatcttgaagctgaaggcttataactgatattggtgttttcatctgatgaatccattggttgatgaaagttaaatgttcactatgtatctttttatgctcttgtatcattgattgatacaatttatgttgttgttttaaaataactgatatatttctccccaagaatgagcttcctaaatacaaaaatgactcctccaaagaatgtattcctttttcaaacagattatatacttctctatttttataatacttatatattaaaaaacataacaatataaaagaactaaataaaagaatatataaactctctccaaaactaataaacttcataagattacagtaaataattgtcataactatgcctatataatatataaaaatataacctttataatcttttaaaaataacttcatactttctccttaccaattcttatttaatttatatcctaaccctcggacagtctgaacagcattatctatacctaattcctcaaatcttttccttatcctgctaacatttacatttaaagtattttcttctacaaactcaatatcatcccatatcttttctaaaagataatctctacttactacttttgggtatctcttgataagacattcaatcagtataccttcttttttagttataattagattttcaccatttaattctagttctaacctttctggataaaactttaatccatctagctccactattctttcgtctattttaggtgaatattcaccatatacccttcttatatgactctttatttttgccattactacatcatagtaaaaaggttttgttatataatcatctgctccactttctaaagctctaatttggtctacattgccatctctagctgatataaaaattataggtaaattcgactgttgtctaatacatctacaccagtagaaaccatcaaatttaggtaaatttacatctaatagaactaagtgtggcttaaaactttcaaatgtaatcattatatcatcaaagttctcttcaacaatcacttcaaatccatatttctcaatataatctttaagtaatgtacttattgatatatcatcttccacaatatatactttataactcatataattcctcctaatatacctatttactcatcatataacagtccaattttaatatattataatctttttacaatatataaatttaatcatattattaacttcacaattactgacttcataagtataaccatattattagacatcttaataaaactctataaaaaagtatctttttatgattaattaatcattattatcaactaatcattctaaaataaattgaaattactaattcaaaatagaaaaagttaccttaataaggtaacttaaacttttattatatttcttacttagtattattttagcatagtttctacttagcattatagattaattcttttatattcacttttttctcttgtaacttattttttattaagaagtcttgtgtatcttcaagcgaagatatatctttatctgttatatctaaactaaaatcataccaagcatataattctttagtttcttcaagacttaaatcaacttctttagctactttttccatagcttcatcaaaattattatttacatattctaaagtttccttttcaaccttcataaatctttcaactatttctgggtgtttctctgcaaagtctgtgctaacagcagttactattataccatctactaaaccttcaccatttgctacaagtttactacctgacttcatagctttaagagctgctggaccagcaatcaatgcaacatctacgctaccatcagaaagagctgctgatgcttctggaatacccatattaacaaattccacatcatccatacttaatccttctttatcaagtgctgaaatcaatacctgatgtaatatagtcccttttggacctgccaccttcttacctactaaatctgctgctgattttattgaattattattagtcaaaatcataaatccttttggtgacctgctataagtgtttaatatctttaactctactccattagatgcagctattaaagctgacgtaccacctagtgcatgtaagaagtctatttctccagcagctaaagcctgtgtttgctctggacctgtagtaatttcgtgaaagttaacttttatattatcctttttaaattcctttccaaataaatcatcctgtttctgaattatagaaggaacatttaatggtgattttacataagttaaatttatttctgaaagtttttctccattattttttttagcacatccagctaaagatgctgttgcaagtgttaatatcgttatacctatcaatagcttttttaatttcatttactctactccttaaaatattattaatttctttaaatgtctttatttgatttcattgtcattaaaatatctttttttaatttaatatagtactctgaagttaaatctctattataaccatcttctatattaaattcttttatttttctttcgtctgtgaaaacaactatttttttgcctatctttaacgcttcatcaatatcatgagttacaaatattacgcctttattagttgacttatgtatttttataacttcattttgcatatcaatccttgtaaaataatctaatgccgaaaaaggctcgtccataagcaacatatctggattgaaagaaagagctctagctatgcttactctctgtgccatacctcctgacaattcatttggataagagtttttaaatttctgcaagttcatcatcttaagatatttttctacatcaatattacttttcctattatatttatttgatttgttcaaattatcatttgtttctaagcttctaaaattatcatttataattttaccaataattcttttattgtgtttaaattttctaagcaccttgtttaaaatagtattttttctttgattatgaaaagctatattttcacttacgtttaaccaaggcattaatctgctctcctgaaaaacaaaaccaacattaggtctatactctttattatcattaataaacctaatctcaccactatttataccttcaagtgatgcaattgctctaagcaaggtagtctttccacaaccactttcacctaaaattactgttatatggtttctatctatgtttaaagagatatcactaagaactacatgttcttcattgtcaactttataacttttatataaatttctaattatatatccagagtcacatactaaattattcatatgcttccaccatctttcccttacttaccttcttcacaataatcgaaaatatgtaatctgtaattattcctaaaagtccaattacgattatacctacaataacaacatctgttctagacatttcttttccatcagatatcaagtatccaagaccagatgaagctgctacaagttctgccccaataattgctctaaagctatatccaagagctaactttaacccaacagcaatatcaagaatggcatttggtattattattttaaatattatctgaagctttgaaaactcaaatactctacccacttcaatcagttttgagtcacaatttttaatccctttcaatgtgcttgtaaagattgggaaaaaggatgctaaaactataattataatttttgattcctctcctataccaaaccataatataagcattggtattaaagcaaggggaggtgtattccttaaaaaatttattagagatttaaagtattcgtatactccactataaattccaaagaatatccctaaaggcacacctatagcagtatttattgcaaaacctatcaaaactcttttcatacttgcatatacattaataaatattgaaccatcacttatcatatttaaaaatgtactatataccttttcgggtgatggtaatatataatcactccaaataccaagataatttgtaattttccataataaaagaattataaaaaatatcagaacactctttactagccttaaaaacttattattaaatttattgaccatttacaaaccatctccattattacaaccatctttacaataaaacatttctactatgtcatacttatcttcaaagccatttcttattttttgtatttcacttaatatttcgtcttcacttgatacttcaagaactttttcaaaagtatctttgaaatatcctaatggaattggtgattcatctatttttccaagtgattttacaccttcttgttcagcaaactctttccatgtataaaacatagcattacccttatccttaaacttttcacttgcaaagtctcttaattgtgtacatggacaggttactaccaacatatcatctttactttttatatatttatcgtataaaaccctacaagtccttactaatattggttctatcataggtacttcaaaattatttatcaaattatttctttttaaaagacttatactttctggacatctacaatccaacattgtattttcagtcttttttgtatactctttgtactgcttttttacatattctaactgtggttcacattctgctattatgtaccccttttttatcaaatttgctttaataaggtgaaacttttctccatacattctttctgccactggatttattagaagatatttattcataacgcctcctattatttaatattgaatattattatcaattaatagtttaaatgagcacttaaattttgtcaatatattaatttttccttaataaaacaatttttatctacattttttaatattttaaatgaaatattaaatagtatatgtaatttattttaattaataatgcatacatcttactaataatctatttatataataatctataaatattatataataatacttatataattagtattattatttaatagcaacagttattcacactaataaaagtagaaagtttttaaaatattatgaaacatcaaatttaattttaaaattgcatcaaaaaatgaagtctcaacagacttcactttttataactcttataaattattcaaaatatttatacttccctttctacttcaaaacgtaaaaccgtcttcaatgattcaggcgatacttttctagcatcacttatataaatttcacgatgtgtgtaagattttcttataagtttattttttttgcaaaattcgttcataatgtcaaaactttctggttcattatcatatgaacctatatgaagcatttgaacacatagcccttcattaatagacccaaacctaactttttcaagaagattatgaggtttcttcttctttactatatcagtagctttatccaacaggtcttgtgtaacaaaatctggctgacgtatcattatagtgtaaattaaatcttctttaataagtacatctaagcctttacttttttctcccttatcccatataccttctaaaggaaaaaccgtatagtcaaaatacccttctggtacaattccttttttaggcatggtttttattgcatatgccaaagaataaagtactcctattgcttcaataaattctttagaatttgggtctccactcccttttaacatgataaatttctgttctggtatttcaattattacaggattctttttaggtaaatataactctttatctctttttctccattcatatttcataaaaatacctccatatatattttatacattgatattatcacgctaaaagtgacaacagtgtgtcataattataaattatattataaaatcttcatcctctaattcctcatacactcctttttggtatccattacccttagttgaaaagaaatcatgtgttttggtttcagtgctaagaccatttaatacaattggatttatagcatctacagtatatagcttctcaaaccctagattttctaaagctctattcgcattgtattttaaaaagttcacaacctctttttcaagcccactttctctgtatataacatttgtatactctatctcattctccataaggctataaagtatagaatacatcttctcttctaacatcttcttatccattttatcaaatgaatcgtatatttcttgtgctagcaatcctatatacttaccatgtaaagactcatctctaagaataagcgatattatttctccactagctaccatctttccttgaccagatagatacaatggataaaagaatcctgaataaaacaagaaactctctaaaaatacacttgtaaccattgataggtataatccctcttgatttgtagtattttcgtattgagctaaaactaaatcagcctttctttgtaatgttggttctgtttctatccattcaaataattcatctatttctaaattagaaagtagagtcataaatatagaagaataactttttgcatgtatttcttccatagtccccataaaagacaagacagcttttctttgtaggttttctgttaaactcatcatagatggtattccattattcccctgttttgtatccagtaatgttaaaccacccaatacttttttatataattccttttctttattacttagttcattccatacctttatgtctttagaaacagatatttcttcaggaagccaaaattgttttacattttgttcccaaaaagcttgtgtaaatccatcttcttctctattccagttaactgcattatgtattttatgtaaattaaatgtcatatatttctctccctatactgaacacactagacactcatgagtatctcttgtcatctttgttcttgtgtaatataaacttttcaaaccttttttataggcatatatgtaatgtctagctatatctctagttgtcttttcatctgtaacaaacagtgttgttgatataccttggtcaacatggttttgaactgttgccactaaatctatgacctttctcatatccatcctgtatgctgattgataatacaacatattatcatttgttaaaaatggcattggatatattgtagtagagtctccatatgttcttacttctactggctcagtaattggcattatacttgatgtagcattttgaacataactaatgctttgagttggtgctactgccattaaatatgcattatatatccctttttcttttacttcatccaataattttgtccaatcttcttttgttggtatataaatcccttcaaataatgctcttaccttttctgacttaggtagataagattgttcatagtattttgataaaaccttgctatttcttcccttaacatattctgatttatcaaatccttcaaaagtttgatttctttctatggctattttcatagaagctttaattgaatagtatctaaccattgcaaaaaatacattagaaaaatctatagcatcatctgaagtatataaaatattttctcttactaagtatccatgtaaattcatagctcctaatcctatagaatgagacttgctgttactattgcttaccgttggcactggttttatatctgtgctatctgctacaaatgacagtgctcttattgctgtttcaactgtactttctatagttttattatccattacattggctatgtttaaagaacctaggttacaacttatatcttgtccccattcattttttcctccatacccctctatttctgaaggtgtttgatattgaaatatctcacaacataagttagacattttaataattccaacatcttttaatgtatgttctctattagctgtatctatgtacactacatatggatatccactttcttgttgcatttgtgctatttttgtcaacatctgcctaggatttatttctttttttcttatatcactatcattaaccaatttatcataccactcatccatttctatctcatcaagagaaactccatatttcttatacacagtatgaggataaaatgcatatgctacttcatttttttctgccaactccataaatttatctggtattatagctcctaatgataatgtagcaagtcttattttttcatctgcatttatctttttagtatccatcaacaattcaaaatcaggatggaatacagtaaggtacaccgcaccagaaccttgtctagctcccatttgattaaagtaactaaatgattgttctaacattttagctactccaacaacacctccagctgcaccttctatatctttgatagattcgccagatgctctaagtttagataaatttagtgcaactcctccaccaatctttgataagtgatttgatgaagatatagcatatgatataccttctgtactatcttctacagatagtaaaaaacatgataccatttctccagccctctttcttccagcatttaaaaaagtaggtgtagctggttgaaattcttgttttactattttatctgccaagtttaaagctaaatctttatcgccatttcctagtgtcaaagctacaattaacactttatcattatatgtttctaatatttcctttccatcattgctctttaatgcataattttgataaaacttatttgcactcatatatgattgaaattcaaacttatgtttatcaatcatatcatatatatttttaataacatctatgctatactgatttattacttcttttaaataataaccttcatctattaaatacttcaatctttcttctaggttattaaattttctcaactttggttgtataaattcttctatgtaactacttaaggcttccttatccttttccaattggtacttaccttgttcatttttaattatcacttgattgttaagctctatccaattcattatttaccgtccttttaacataatcttgtgccataatttcacttaatttgcttattatttcttttggtacttatcagttgaaatcccaaaattaatctataattatagaaatgcaataagtatttttcaaaaacaaaagcactacatatagtcagtgctttatctattatatactacatatagtatatacacaaatttttttatatctaaacttttattactttataattgacattatttttatttaaagaaatttttatcaactcaaatataaaaaaatacaagcttattatgtcctgtttaaaaatttaaattatctctaaatagcttaaaaatatattctgatatattgaaaaaagtactttcaagatgatattttatatattatttagaagttttttatttattgttatataattaaatatatgactattttgctactacatatataaaaataaatttatgaaggtgattttaatgaaaactatttctaaacaagaattagaaaaaacacttgagaaacattatttatggcttaaaaacaataatgctggagaaaaggcagatttaaaagaattaagattagaaaatatggacttaagaggatactgcttaagtaatattgacttttcgtggtctgaccttatcaatttaaatttagaaaaagcagatttagaaaactctatttttaataattcttatctttcggattgttcattaaaaaattctatattaaaaaatgcagacttaagtggtgcaaattttagattttgtgacttatctaactcagatattagaggagctaatttagaaaattccaatttagaacatgctactttaaatggagtaatatcagatgaaagtacccctttttttaaattgtattgtcctgaaacaggagcatttataggctataaaaaatgttttaatttcagaatggtacaattattaatacccagcgacgcaaaaagagtgtctgctacatcaaatgcttgtagatgtgataaggcaaaagtactgtcaattactagtatagatggtaaagaatcttttaaaagtgctcgtgcatatgctgatgaaaattttatatatagagtaggagaaacgattgtagctgaagattttaatgaaaatagatggaaagaatcgactacagggattcacttttttttaactagagaggaagctattggttatctataaaatgctaaagttttataaatatataaacaaaataacaaaagagtatagattgtaatttcaaaaaaattataatctatactcttttttctatagcacataagtacattttatttcataaattataataaattatttatatctgcactattgattatttgagaaactttatctatatgttctatcttactatccaaactgtcataatacttcttactctcatctctatttctaaaagaataaacttttttatccagttttaaagcctcttttataatatctatattcctcttatttgtctctcctacactaaatcctgtatctattataatcttggaatcatttaaatttctaatagccaaatcgaaactctcatcacttatcggctcaaatggattttctgtaaacatctttatccccatagttctaccaatttcataatcaatatcattttcatgtattattccagaatacagacctataccttttttagtaaaagctctataaattggtgttgctttacccccaccaccaattataaaaacttcatttttagatttattactaatttctactgaacctaaaagactattaaagtttttatcatccaattcataaagcgaatttataatatcctcatctactacatcttcaggctgaccataagctatgactttattattttttataagagcaactttatcacaactttttaatgctatgtctatttcatgcaatgaaagtattactgatattgacttttctttacttaattttttcagtatgtttatgagctccaatctatgttttatatccaagtgagttgtaggctcatctaatataattatttctggttcttgaacaagagctcttgcaaccaacaccttttgtttttctccatcacttagttcatcaaaatatcttttctttaaatgtaaggcatctacagactccaatgcttcatctaccattattaaatctttcttagatagactcccaaaaaatcctgtatatggataccttcctatattgactatatcttgtacagtcattaaatcacctaataatctatttgtaagtactaaagccattttttttgataatgcttttcttgatatacaatttatgtttacaccattcaaatatatttcaccttttattggtgatataagtttagataaggaccttaatagggtagtttttccagctccattacttcccaaaagacatagtatttctccattttttacttctacatttatattacttataactaccttgttattgtatcctacacttaaattattagttttcaacatgtctaagccctatccttccttttcaccaataacattactacaattggagctcctaataaagatgttatcgtgcttattggtaattctactggtgataaaattactcttgatattaaatcacaaagagctgtaactatactgcctaaaaatattactactggtatcaaaactctattatctgatgttttaaatctgaacctcccatgactaaagtcacagggttcctgcttcatagaattttgcatactaaaatatgtcttactaattctccacaggccatccccatagttcctacggttcttacataagttatttattttgaattgttattagtcttaatccttcttttaatatatttatacttgcatttatatctctattgtgagtttcattacaactaggacaaatccattctcttatatttaagtccttcacttcctcgtttttatacccacatttattgcatatttgtgaacttgcaaagaatttacctacctttacaatttttctaccataccaattagccttgtattctaattgacgaacaaattctgaccatgatacatcagaaattaagcgagatagtctacgatttttaatcatattctttacttgtaaatcttctatgcaaataatatcgttctcttttattaatttagtagatagtttttgcagaaaatcatttctttgattagctatatgttcttgaagtcttgcaacttttaatcttgctttatttctatttaaactaccgattgtctttctcgataattctctttgtaatttagcaagtttgtttaatgacttcttaagatacttaggattttctataaattctccacaacttgagatacaaaattctttaattcctaaatctaaacctatatgattattagtattttcaaatgcttcaatatctacatcagtacagcataatgatacataatatctaccacttggttctttagatatagtagcattaagtattctccctttaggtacttgtttatcccttatcttaaccataccaagtttaggtagttttatatgttgaccacaatacataatgtttccatttgtaaagttagttttatatgaaaatctattaattttctttgatttaaatttaggaaatcctactttttctttaaagaattttttatatgcattatctaaatcttttaaggcgttttgtagtgaaaatttgtcaggttccttaagccattttaattctttttttaaattgttcaaatcagaactacactgtttataagtaaaagtttctttattgtttttataaacatctattcttttagcaagatacttattatatacaaatctacaacatccaaaagttttgttaattaactcttgttgctttttatttggatacattctaaacttataagctttttccactactaccacctcactttacttgttttttctgattattaatatattttcttatctgctcctctgtattttctgatacagtagcaacgaaataactaggattccaaagatgtctccccataatgctggctgtctatatttgacatactatatgcatatcctctaccatgagtaacttccatttttcatcacctatcataatattaaaatatgcaattacttaaaacaagtattttgaaggttttttatatttaattttaaataacatatataagaaccataagtcttaacttttatcatttttgaggttgtcgttcacataagttcgctactacctatgcagttctcttatgaacttcttacactttcatgcaagcacagactatatcttatccttcggcattatccgttaaggtctacccacttccactaccaatagcttgtagtgtacttccctcaagaggaatagtcgttgaagtttctcctattcggagcttacctgctgattgcccattttaaagtacttagggtttaaccttataccatctaaccaattttttctactttcgtaactttcacacttaggtttatttcatccttatgttttagtttggttagctttaggggtttccagcaattcaagtagtattggataggttctatcctatctctacatataggtttccctatatgctgactattttagctactaactcatgactaaagtcacaagtgtgcgtagctattttttaatcaattttgaaatttgtggcactgcaagtccaataaaccctataggtcctgcaaatgctgatactattgctgctaatatactagatataaacactatcaaaactctaaaaaatcttatatttatgccaatactttttgcatactcttctcctaataaaaaagcatttaaaggttttattatgaatacagtcatcaaaagacctaatataccaactattataagtatttctaccttttcccatgtaaatccagaaaaacttcccatagaccacatagtaaattcttttaatttatcactatttgcaaatgattgtaacacatttgttataccactacatacatatccggtcataattcctattattaaaagagttgttatattctttaccttatttgcaaataaaatgactatagacattacaattaaagctcctataaaagctgctacaaatatactcattgaatttacactctcaaatcccaatgtgtatcctcccaaaatcatgagagctactgataaagtagaacctgaagatactcctaatatatacggttcaactattgggtttttaaaaaatatctgtaataaaatacctgatactgctaggcatgctccacctaccatggttgcaagtactctagggattcttatattgtatattattttataatgttctgtattatccatacctcttaatacaacatctattacttctttaaattcaatttttacagagccaaatgctacacacactaaaaaagtaagtatcatacttataattaatactataaatattgtcgtattccttattctcattttattgataaaatccatttgtatactcctcttagcaaagttatattaactaaaatctataaaacctatctttttgtgtcctctctgtactatttatcataatttatataatgtttgattttttcacctgtagtacctgggtggaacatctcaactaaatctactattaattcgtccgtcttatctactgattgataataatctggagcaaacacccataggtttccgttttttacaacatccaaatcagccaatacaggtgcactagattttatagaatctaaatttggtgcataatctgaacttgatgagtatacaaatatatctgcatcttttgcaacttcatgcaattgttcaatacttactcgcccttcatttgaatctattgaagcacatgcatttattccaccagccatttttatcatattatccacatatgaatctttaggagctatataagcacttccttcatatacagatgcccatacaactttaggtttagctttgttttttatttttttacttacttcttctaccttttgtacagttttatttagttcactagtagccatatcttctttatcataaaatgcagctattaaacttgtccactccattcttccaaatggattttgctctttatactcattgtctacaacataattaagccctaattcttttaatttgtcaataaattttgtatcagcctctgataaaccactactcactatagttaagtcaggatttaagtctactattttttcataatctggtgctaaatttgaaccaacgtaatgtatttttccatctttcattaaatctttaatttctttaatagtccagtactgctcttctgttgttacggcttttatactatctagttcatctattgttctcagagaacaagcctgtgttgtagatgctattaatacattgtccacaggcgttctaactatattagcatttttatatttttcaggaattttaatcttctttgggattaaaatcagttctcgattatctccatcagttacttttttaattccatcttctaaatcttcaacactaaatccactagcatattttaattctaatttcttaccagtactagcttgtttattctctttgtcacttttactacaccctataagacctcctaccataaaaattaccatagcaattaaaaaaaactgctttaaaacatttgatttaaatttcatctctttcactccaatatcttattttttatgagtggctaaaaaactttaataatatatgctttttaaagtatacttattaaagttatcctaaagtcatctttaataagtataaccttttaataaaataaaaaacttctcctaatttaataaggagaagttcatatatcaactttacaaaaacgaattgatacttcattttattataaattacaatctccaccctaaattgaacttatataatactgggcaggtctcctgactcacggcttttcctccatcacccttcccaaaatttttataaatttcagtggattttgatttcgtatccgtatacagtagcgggggctgtagtgaattttcatcactttccctattaaactaatatagtaccctagtattattttaatttaatttttattaagataattgtaatttattgttgacctctttgcaaggttgatttaacatatatttaatttattcatcaattttttaatttcacatacttgtttttcatttggttttacaaatggagcagtcatataatcacttatttgtaaccctctgatattcatagcttttttcattgctggtataaatggattggttattaagtaaaaatccattgctttattaatatatttttgaatttctataaccttctccatatctctattattgtaagcttcagcccatttggagcaaacttctggaattaaatttgataatccccctatacaacctgctcccccagacattagattatgtataaagttttcatcataaccactataaaccttaaattctgggaactctattttcatagtatttattaaatctctggtatgtcccatcaaagttactgtatccttatatccaactatgtttttatgttttcttgcaagtcttaatgtaagttctggacttaaatcataaccagttctatctggataattgtataaatatatttcagcctctgtattcttagctatttcactataaaataactcaatactatcatcatcaagagagaaataataagggcttattatcataacgccatctgctccactattatgtgcatagtttgaaagttctatagattcatttatacacatacgacttgtacctataaacacttttactctcttatttacatgactagttactaaatctataagttctttttgcatatccatagacatattaaagaactctccagtacttcccattatgactagtccatctacacctccatctataagatggtcgtacacttttttattaccttctttatctaaatttccttcttcatcaaatattgtaacaactggtgtcaaaaattctgctttcataatttaaactcctaaaatttattttaatatgttcattaatacatcagatttagctttaatattaattatattaaaacatttacttaatgtaattttttaaaattccaatactctcaatctcacattcaactacatctccactactcatatatcgaggaggtgaaaatcccatccctactccagaaggtgttccagtagctataatgtctccagcctctaaagtcataccttttgaaagttctgaaactatgtctgaaacatctgatatgaataatcctgtattagaactttgtctttcttcaccatttaccctactacatactttaagttttatgggaaaaggaactgcacttttatgtaaaatacatggacctaaagaggtaaatgtatctaatccttttcctctaaaccattgaacatgttctttttgcaactttctagcagaaatatcatttataacagtgtaaccaaagatataatcttctacctcttcttttctaatattaacacctgttttacctattactactccaagttcaacttcatagtctagttgattatttatctcaaaatgaccatctatctcatcttctggacctattgcctttgtcacacgttttgtaaaataaaccgttttttgtggctcttcaaaactatcatcaaagtgagtttgagtttcttcaagatggtctttatagttcactcccacacataagatatcatgtattggtttttctataggaacatgtacagtacatctctctcttttaaaaacatcataattatagaatatactttcatttataatagttttcaacttaataatatcttcactagatacattttgaattaattcatttaaatccttaaaatttctactgagatttaaagagttaacatctataataaataattcatctttagaaaaaactccagttcttttacattcattttctccttcagtaaaacttacaaacttcataatctcaccctttattaaaattctatgtatttattttcttacttaaagattatacatagttgcatactctagctattgccatttcagtatatccaagggactctgcttttgattgttttccatttgctacatctacaaccatatttaacaaatcatctgttaattcttccattgtttgtggaccatagataactggactagcatcaaaatccatattatcttccatatttgcaaaagttattttatttccagttatttttattactggtgctattggatttcctgatggtgttcctcttcctgtactaaataccactatttgtgctcctcctgctaccataccagcaacagatgaagcatcatttccaggggtatccattataacaagacctttcttatcaatttgtttggcataatcatatacttcacttatttgtctatgacctcctttatgtatacaaccaagtgatttttcttctaaacttgttaaaccaccagctatatttccaggagatggattaccttctctaacttcttctccaaccaattttaatgaattttcatatctatgtactatatgtaatattttttcttttacttcttcatttactgctctcctagctagtatatgctctgcacctataaattcagtagtttcacttaaaattgatgttgctcctaaatcgacaagtttatcacttaattcacctattaatggatttgctgctaatccacttgttgggtcagacccaccacattcagttcctagtataagttcagatattggaaattcttcttttctaagcaaagaagcttcttgtgccatttctctagcataacgaacagctttttctatagtttttaaagttccatgttcttcttgtattacaagagtttttattggcttatttgttctctcttttattgcatcaactaccaaatcattttggcaattttcgcatcccaaagatacaactattacaccatatacatttggatttgctgcataaccagccataacatccatagttaattgttggtctgaatgtacttgtgaacatccattctgattattaaaggtaactgccccttgaacttgtgatgctattattctagttgtatctgatgcacacacactcgtaggcaatattaatatgtggtttcttataccaactcttccatctggtcttttatatccataaaatttcatactgatttcctcctaaaatagtctatatactttttataatttttatatattataatttttattacactcactaatcaaacagctaaaatcctatttaaaaactatttgacactaaaagcaatgaatacaacttttataactctataaatattattttatatattagtcataacttgtttatccaaatcctctctaacacttctaacattatgaatatgtacatgttgaccactttttatttcctgatttgcttctcctatatgttcaccatatttagtaactttatcaccttgggccatatcttttatagccaatttatgataaatagttatattatctagtgctgtaatcgtttttactgttttgtcttttaatttaaaactaatttcattacctttagctattgcttcaatagctactgcaacattatctttttcatcaattatcactgcatttatcattattcttgctctcctttataaataatataattttattaatatcctaaaatctaattaaagaatttattattttaccaacaactcactgtaatataaattaagctgttattgtaccatcctcattttgttttgggaacttaggacatccatacttcttagcccaccaactagttataagaggtactaatattgcagtgacaactactgcggctgccacttgtgttgtagctgttgcaacatatggttgccatgatgggtcaactaatgcaacagcagcaggtacagcaattgcatttccagcggttgtagctacagcccatcctgcatatcctggacgttttcctataaatttatcacagaatactataaatatacctcctacaaatacagatattaatccaagtaatactcctgataaacctccttttagtatacttgcaagatttatgctactaccaagtgcaaaccctacaaaaggtacgagtaaattacaccctggctctaaaaactctttcatttttttgtcaaaatttcctattatcataccaacaagtattggcactattgcagctaataatgacaacaatggcacatttgcaagacctgaagtcccaagagctattaatgtaaaaaatggtccatcatttaaagtaagtaaactcatagttgcacaatctgtttcatctccatatgaagtcatcaatgaaagatatatactaccattactatttgtaactgcacttataacagccaatgttgtaagaccaaggacaccatccattccaaatagctttcctataagtatacctatcaaagcacctatagcaaatttagaaccaagaagtataccacctctctttaaaacttttggcatttctctaaattgaagctgagttcccaagcataccagttgaaccccaattatagttgcagacccaacacttgaaaatactgctgtcgtaaacgaacctatttgtacaatatctgggcaaaaggtattaatgaaagctgctataaacattggcactatcatcatacctgcaggaatttttttaataaaatccattatcataaagttaatcctcctaaaacatgatatttaattactcttattaagtttttagctttaattctaacggccgtttcggttcgtatttaagaactaagtttttaattacgaatctttgaattaatgatagcattttcctatttatgagtcaataaaaaaaataaatttttgtcaaatttttttcaaactttctgataataccttgtatattatcaaatgacttccttatatgcaaaaatacagcgtatttaaaattatatagtattcaaaactataaagtttttatacagtgtaaaaaatagataaaatataaattcataatattttgatatttacatataaaaataactattgcatatatttacttaaattatataactaaatatcacttactttctttaggtatattttggaaattagttattccttaatgtacagtctaaaaaaatatctatctgtatctaaatcaagagcttatttatatataaatttacatatttattttctacattgtaaaatatcgtatagtgtgctaaaatcaacatattctaatactttaaattaataaaaagagggggaaatttatgacttcagataatcatcgcccaacagctaggatattagatattttagaagcattagcagaatccgaaaatggatatactcttacagaaatagcagatgttatcaatgctccaaaaagtagcatctttcctatagttcatacacttaatgctagaaaatacattactattgataaaaacacatccaaatattctatagggatacgttcttacacattagggtcttcattttttgaaaaaagaactatttttaactatataattgacgaaatgactaatatagttaattcctgttctgaaacttgtcagcttggtatacttgacaataatgaagttctttatattggaaaagtagattctccagaaccaattagacttatttcttatgttggaaaaaaaatacctgctaattgtacaggtcttggaaaagctcttttatgtgattttgacaaggaaaaactaataagcttatatccagatggtctaaaaggttttacagaaaaatcaattacagattttgatgttttatacgaccagcttcttgaagttcaaagaacacaaatagcttcagagtgtgaagaatcaatggaacacctaaaatgtcttgccgtaccaataagaaaaaatggatgtataagagctgctgttagtgtaacactgcctttatttagagctaatgacgaaaaaatagaactgataaaaaaattactcttaaatgctcagaaaaatattcaatcaatgatggaagaacgtaatgaagacattgtaataaattagattaatattctgtatatggaagatatcaaaacataataattaaaaattttgttttaaactaatgtatttatttgatttatactataaaaacaaagttgctgatttaactacagtaactttgttttttttataatattttttatatttttattgacatgataaaaatactatgttaaattctaatcataatcgtaattacgaattaagttcttatataagaaccagtaaccctatctcaatctaagatacgatatattatgagtaaattagtgaaaattgttagatatatatttttacataaaaatcaatgaaaataaaaggagattttagttatgagcacttattatgtaccaccaataaatttacttgggaaaggatgtcttaatgaagctaaagattcaattaaatcattaggaactaaaaaagcatttgttgttagtgataaatttctagtttcaaatggtactgtaaaaaaagtaacagatattttatctcagatagatgtagactttgttgtttatgatgaagttaaacaaaatccaaccgtaactaatgtggataaaggacttaaaatattaaaatcagaaaattgtgacttcgttataactataggaggaggttctccacaagactgtggtaaagctatctctatattagctactaatggaggagatattagagactatgaaggtatcaacaaaacttctaaaaaatgtcttcctatcgtagctataactactactgctggtacatctgctgaagttacaataaactatgttataactgatgaagacagacatgtaaagatgataatggttgataccaactcactagctacaatgacagtaaatgacccagaattaatgattagcaaaccatctaatttaacagcagcaactggtatggatgcactaactcatgctgtagaagctgtagtagctaatggtgcttatgatgttacagattcaactgccttatatgctataaagcagatatttaaataccttccaagagctgttaaaaatggtaatgacatagaagctagagaacaaatgtgttatgcttgttttttaaatggaattgcctttagtaatgcaggtcttggaaatgtacatgctatggctcatcaattaggaggtttatatgatttacctcatggagtatgtaatgccatgctacttccaatagttgaggaggaaaatgctaaatcagcccctgccaaattccgaccaatagctgaagttattggaatggatgtaaataataaatcagataaagagtgtgttgactttgtaatagataagataaaagctctttctgaagaggttggaatcccaaaatctttaaaagatgtaggtgttgataatcctaattttgaattgcttgcagaaaactctatgaaagatgcttgtgctggtgctaatcctgttttctttgataaggagaagattatagaattgtttatgaaaatatcttaattatgtatatttataagagagtgcctcaaaatatctttgttttgttaatagcactctcttattacactttttaaatagtactctttatgaagaagttaatatataatcctattaatttgagaatcattatcccaataaaaactcaaaatttttcttaatgaattataactgttgttgtatctggtatattatcatatatccactttgcattttccgtacttaatcttatacatccatgactaagagcttcaccaagtctgccatctattatataacttcctgttgaatcatatagcacagaatgatagtaatatccacctttaattctagtagcatacttaactgaatactcatccgttccaaaagaaggttttcttccacttatataaaatatacctgttatagttggagtctcaggcttgcctatagtacattgccacttgtaaagttgcccccagcctccattatctttcttaaaaatataagtatatttatttctaaggtctgttacaattagataatcgctagtacttttaatattattttcgttaacaaatttaatcatgtcagtataaaaatacttataatctaattcatttggtttattcccatcagttgataaaaaataattaaaaacatatcctattttatcatcatatacaatcttactccaatctccatctacttgaaggacttcaaccctagatttttcaggaattactgtaattatattggaagttatagatttatcttctcttaagtttaagttactccaagcatattcgcttactgataccaaatccttatacacatatccttcttgagaattgtacatcaccttaatccagtcatcttcttcatccaatacttccattttagctccctgaggtattactgttatgatacttgaattagtagatttagcagacctcaaatttacatttgctaaagcatatttatatataggtgctctatattttttaatatttagtttagttaatttcacacatatccatcctctcatatgtctttttacaacattttatgaaattcgatatgtattcgttctcctattttcaaactttacttgtattactaataatattgctacatatacttatatattctcacctctatttatctatttatttaaatttatgatattacattctttaatatactcttcaattatacctctagccacattaaaataacttatacacttgtcaactatgactgcatcactactaactactctatctaatttttccaatacaacatctgcattttttactaattctacttcagtttcaattccccaagttttggcatgctctaatatcctatactttaaatttcctgaattagaaactggagcatctaaataaaatttaagattctgtgcattgtatttattaaaaaatttacctatcagattcaaagcttcttctgttttatctataatcttataggttcccctaagacctgctaaatctcttatatttccatcacttcctattactagagtaccaccagataatgctacctctatggatattatcaaattaaagccatctatatttacggtatcttctttgattttatctagaaaaagcctttttgattgtcttataatatttttttcatcagtacagactgctctttttaatgcatctctttgtcttatagaaaactgatatctatcaccaacaaaagtaacgactgggtctattttgtaatccctatttaataaccattctatttcttctttagcctttataagtcttgttaattctttacttgaaaaccatcttttatcactatcatcaaaccctcttttagatatcttatttatatcatttcaccaccttgctttaaagatataactgtactacattaaatacagattatttcaccttttaagataatttttaataccattatcttatccatttagattattcaatatttataattaattataacgcttaacctcacttaataatacagaataatagattctatattatatttataagtttataacataaataggtagtgttttaaaataaactttttagttcataagataatcttcttttataaaatcaaatatatttttatcatttaaaaagtaaaaaagagacttatctctattttttgagatagcctctttctaaaatctacttataatgataattttaggtttatatattaaacttatgttatacttcttttatcatattaggagatagaatatcattaagagcttctgtcatagttggatgtgcataaacacggtctcttaaatatgtatactctacttctaaatctacagctaattgaataagatggataatctcacttgaattttcacatatcatactagctccaagtatcttattggattttttatctatcactatttttataaacccatctgccttgccaatctgtttagctcttggaattgcttctactggcatctttgccactaatacttcatatcccttttctttagcttgtttaacattaagaccaactcttgaaaatgctggacttataaatatagaatttgggatattctttctatcattagttgttctagtcttatctccaaataactgattaataactatgcgataatcatccaatgatatataagtaaattgtggacctccatttatatctcctatagcccatatatgctctttattagtcttaagagtttctgagactttaataaatcctctttcatttaattctatacctgcattttctagccctagcccttcagtgtttgcttttcttcctgtagctacaagtatcatattacttgttaattctttagatttaccatctacttcatattctactattgctgattcagaaacttctttaatctcttttatatttgcattattaacaatttttacatttctctttgcaagtaattttattatttcttctgaatcctcaacatcttcatttggtaaaatgccattattagagtttaatattgtaacttctgctccaaatgaactataaataccagcaaactctaaacctataaatccagctcctataattgtcatttttttaggtaaaactcttagattcataagagactcactatcatatactatattcttattttcaattcccttaatattaggtataaatggtcttgaaccagtattaataaatatattatctgctactaactcataaatttcattttcagttttaacttgaactgttttttcatcaatgaaagttcccattcctgtgaatatagttacattctcatttgaatttaatttattatagttagcttctctgagttttgtaattaaagtttcttttttatctatagctttctcatattcagcttgtacttcatcccaagaatttatattctttgtttttacgctgtttgctgaattttctaagctttttgttggtatacatgccacatttacacatgtcccaccatacatcttgtttgacttttctattaaagctacttttaatcccctgtttgccaaatctcctgctaatgtttttccaccttttccaaatcctattattatagcatcaaatgtttttttcatataaaattcaaccctttcttgtattgtttatacttttactataacaagattatttaggtggtacaattaggcacttttttgtaaccttaaattgattcataaacatatacttaaatacttttatttatttctctgattttcaataaatgatgccatagttgccttatccatagctcctggaatatactgagttacatatccttccttgtcaattataaatgtagttggaaaagcattaattccatattgatatgctaatgctccatcttcatcaagtacaacagggaatgtataaccttggtcttttaagaagttaactacatgttcccttgaaccttctctacctaaattaggtgaagctactcctaaaattactacatcatcattgtttttattatagtctttatacagttgttctatataaggcatttcttctttacatggaggacaccatgtagcccagaaatttaagaatacaactttgccttcataatcacttaatttatgtgttttaccatactggtctgttaaagtaaaatcaatagactttattctatcttcatcattagacccgttatcattattgtcattattagagtctttttgactattattaccatcagaattttcttctttatcagtagaattttctcgcttattttcttcttgcttgctttcaattttgctattttgtgacgtattaaagtgtttgcttatacttccaaatccatttaccatcattaatattcctgatactataagtataatcccacctatttttttaataatttccatgttagattttatcttatctatagttttaaatagtttactgtaaaacatagctgtaattataaatggcaaaataaaaccaatagtatatactgctattaaaagattggcactaagatgattacttgaacttgaaaccatgactaatacagatgccaatattggaccaatacaaggtgtccatccaaaactaaacgtaaaacctaatataaaagctgttattgctttcatttctttaaacttaacattaaatcttttttctctattcaatattgaagatttaattattcccatgtaaaataatcccatgataataattataatcccaccaataaacattattaaatctttattttcattaaaaaacatactcaatacttttactgatgaacccaatataaagaatgttgttgagattccaagagcaaaaaatatagtatttttaaataaagaacttcctataaaactcgtctttccttcttttagattttctacactactatttgacaatatactcaaataaataggcaaaattggcagtatacatggtgaaaagaatgatactataccttctataaatactaaaaataaatttacattttgcaaattaaaattcctccttattttatttccaatattacaatcccatttctaaattaaaatctaactaaaaaattatgtaattttaatacatttttctactcatagcttaattaaattttcattacttacagagtaaattttagtatttatcacaatttaaatttttattgctccacataatcattttttccatgacaggaagcaatcgtaatcctgattcacttaaaaaatatgttgactctacaacattattaaccaactttttttggttgactataatcccctgttcaattaaaaaatctagttgttgaactaacattttcttactacagtctggtatagctctttgtagctctccaaatcgtttcttatcttcttgtattttccatataattatagccacccattttttacctaaaatatttgataaagcttctactggacaattatatatcatatcatctatgttgtacattttattctcctcttttctttatttaatttattaaacaaacttttatagcaatatatttattaatattataaatatacctagctttatttaattaaaatttttattatatatactcctattacaaactattttagattttatgtaattaatatatcagttttgtaaatacataacaattggtaacttttttgtaactacatcaaccctattaatatacaatctttaactcattttattaacattttattattttaaattatatataaaatcactctaatataataattctttatttaaactgcttatcctgttaaactaattattctacttcaataaattctatattaaatactaaattcatatttaaatactaaaactattcattaatatttacccaaatttatacaaattaaaaagtctggcagattaatatctgtcagactttaaacaataaacttacttttacacttataaatccaataatattgaaataacgtcaaaaggtgctatttcatatacctgttcttcttctacatcttctattgcatttacaattttcccatttctatttttaaatatttgctcatccaatatcattctattactacttggattttccactcttattataaatttatctttactgtaataagaaggataacatgctgatataagatatttttctggtaaagatattatttctaattctctacttacagttttattgacaattgatttttgaatcttattatctatacgatataaaaagaaattgtaatcctgtaattgataatttacacattcccttagataattgtgggttaaattcgcaatttccaattcatcaaatgatttagaatccatatatattgcaaatgaaaattctaatttcttaagcatttgagctttatctgttttaattcttatatgaccttttttagttgtatcaccagaagcacgtcctggtctatataataaatcaggctttcctagttcatctgtagtagcaagtaaggtcaatgcaatttcatcttcaatatgttgatactcttttattcctctagtaaatacagtacagcttctattttggtttgttagagtaatattactttccaaaggttctaaatctataggcatttcactgtaaatatcttcccagttgtctaaaactccattttctcttgttatatatccaaatggcaatgatgctatgtttttattatcttttatatcagtttttatatgaacacgtagtctatgattatatatcgtgttatcaacacaaagttttacatccatcaatggattttctttggataagacaatacttacttttacatttaatttcccattaagatatttgttttttctatcttctaatgtaagtggtagtaaagtagtacctttaaccaccaacttttcatatcctaaagttttttctgtatacactctatcaaatgaaagttttatatcctcgtcattttttaatggagaaaagtcataggtatcgcctgcattaccactatcttttaatattaaaaagtttgatatgtaagttccatctttaagttgtaaatttaagcttccatcttcatagattatcttataattatcattagatataaaagtgtcattagatttatcaagtgataccatttctttatcacttgattcaaaactaacaactttataaccaagtgcaggaagctgtacatttattcttacttttaatatataatatcctgattcttcaataaatacgttgccagcaggtgtttcttctaatacattttctctcggttttacataagtttcttcaattatagtagcatctaaattatctttaaaataaatatttttactatcacttacaacttgtatctctttatatccattaaaacgcttagcttctgtattaaatactaaaatatcatttttagataatttaagcccttctgaaatcttttttacaatagtattttcaatactgtcacatatttcatttgcttctcttatacggtgaagaatataatctgttacagtatcagttacacatccagctagactatcgtgtgcttgtccttccaaaagttttttccatgtatttataagtaactgattgcttatttcaattttactctttttagcaattactaataatggctctattcttttaatcagcttgttttctagtttatcacatgctaattttatatccattctactagaaccaattgatttatgtattcttgctaatacaggttctctaaattcacctctatagctttctagtgattctatggactttatatattttaaaaactcttgatatgaactcgttatatatgaatactttccgatatcattaatcgctttaattttatttttgaaatcacctattatatttaactggtcattcccagaaggtattaacacctcatctacatcagtatatgatttaataaaatcaatagctgggtctaagcgtccattaacatactttaatgaaggctctaaaagcataccagttccatatccatgtggcatatttactgcatatatataactttctccatttaagcttttccacttaaaatatggtgattgaacatgtttaccaagatgtatacctctccaaaagaatatattatcaagacctacatgctttaatagtataggcatctgtgcattaaatccaaatgtatctggcaaatacccaattttcatatacttaccatactttttactttcaaaaattccaatcattaagtttcttaaaatagactctcctctagcaaagaatgcatcagtttgagtaaaccatggtccaatatgtagtctatcttcttttattaactttttaatgatttctattttttctttgtgtaattgtacataatcatccaaaatagaaagttgtccatcaagtacaaaacttacatctggattacgttctaattcatcaattacatctgtaaatagttgttcactaagtactaatgcatctccagaagtaaaataccattctctatcccagtgtgtatgattaacaatatgtgcttttatcatttattctcctctgttctttatcttttatatttaagtctaaactgaatatttaacactttatttagtataagattcatattgaatatagcttataacacgtcttaaatagttattaaattttaagattcccactctgcttcatcaaaatcatcatcttcaaattcatcatcctcaatcactggatttccacgcaatactataactaatccagctacaattactgttccaactgctattgataacacatacattggccaattctctactgtaaaccatccataaaatccactaattggagttgcatttactgaacctaaaccaactgccatagctgaagcaattgctgttccaattacacatgaaggtattacttttaatggagattctaccgcaaaaggaattgctccttcacttactccaattaaacccattataagagatgatttcccagcttcacgtaactgtttattatatttttgttttgctagtatagtagcaagtcccaatcctagtggtggtataactattcctaccattgcagcagtattaggtgcataaattccacttgttaataatgcaagtgatgttgttaaagctgctttattaactggtccacctaagtcaactgccatcatagcccctataatagctgccattaatatctgatttgtaccagataatccatttaaccaattttctaatccagtatttaatgtggcaaaaggtatacctatcacataattgattaatacaacagtgattaatgttccaaatactggtactataaatattggtactattgaagctgctgattttggtaatttaacatgatttttaataaacaaacatgtatatcctgctataagaccaactgccaaagctcctaaaaatcctgcacctatatctttagcaatcatacctccaacaagacctggtacaatagctaatttatcagctatagaaaatcctataaatgcagcaattacaggaaacattaatcctaatgcagtacctccaaatccatctagatcatgtaataatctaacaatactactagcactttctgcgtatttagcatcccatatatctggtatattatagaaagaaccacctacacgagatattgccattatcatagcacctgcaattactaatggaatcatatatgagattccagttaagacatgcttttttaactcagagactatctttttcaacattacatttccctccatttatttagtgtcaattaactttaatgcatcatttattactttctctgcatcctttataggtgcattaactggtacttctagtatttcttttccctcaaaacgttcagcatttctgactttagtatctactgcaaatattactacttctgcaatttgtgcatcctttgtagttaactcattatcgattcctgtagctccttgtgtttcaacttttataaggtgacccatcttttttgaagctttctttaacgcttgagctgccatatatgtatgtgcaactcctgttgcacatgctgtaactgctataatttttcttttcatttctacatctctccttcttcactaaatatattgattatttcttgttctgaattggctaattttagtgcatctacattgtcatcatccataagtttagttgctaatttagataatagtacaagatgattgctatccttatcaatattgcttatagccaataagaaaatactatctactggtttttcatctaaagcatcccactcaatcttatgcttagtctttgcaaatattatagaagattttttgacagcatcactttttccatgaggaatagcaataccattaccaatacctgtagttgaatgttcttctctttccaaaacagacttaacatattcttcttcattgtccacaatcccattttcaacaaatatactacttaatttttttattgtttcttcctttgtatttgtatcaagattaaaaacaatttgctcttttttcaatacatctgatattttcactatatactctcctccaatagcaaatcgtacacttcctttgtggaagttgcacttaatatgtcatttatattttttttattgtcaataaagtcataaaaaacttcatatatttcatcaagctctaggtttttgtcattttctaatgaaataaagaaaataacttccaccttttcatttccccatgtaataggattttttaacgttgcaacagatatattagattttttaatataactaggattagcatgaggtgtagctattgactgaaaagacgtgtaagataaattttctctctcaattgcacttttagctataccttcttttacaaaacctttttttattaggttatctgttatatacttaattgcatcttcatagtttgaagcttcaatatttaacaatatattttcttcaaagattaggtttctgaaagatttatacttcttagaagtacaacatgaaacattttgtatatttctttccaaggttcttatatcactttcatttaaaatagggctaactactatggttggaattgtttctaactctaaataaatagtacttattactaaatctgcatcaattttactggatactaattcttgtacggaaagtactttttcaatctttatcattggaaagtatttttttattcttgcagacaataacctagatgaacctaatcctgtactgcatactagaattactctaatattttgtggaagttctttcattctttctctaaaagcttcaaaatgtaatgctatataagcacattcatcatcatttattctaatatcatatataaattcaattactttctttaaatctaaagcttgctcaaatgataaagaaaagttttgtttgattgtatttacatatgggtttttaatactaagtccatatttcagtctatttattgatgaatgtacatgtgaagtcaatccatcaattaaatccttgtcataagctgtctcatacaatgtattttttataatttcccgaagatttgatatattatttgtacttgtttcacaaggattagttgaagtattttttagttcattagtatctctatgttggtcagccgctactaaatgtaaatttatatatccaatttcagattttggtaataatattgaaaatttttcttctaattgttttgctaaataattggtatttgacatttgattattttctatattaccaatatacaaactttcttctatatattcgccttttctaattctctctacagctattgccaaatgaataactaatgactgaaattcataatcagagaactcaaattttctttctctgctgaaattcctaagaatatcaataattattgataaatcatcttccgaaaaaataccatttacatctgcctgtatcttttcaaatgcttgataaaagctttcttgctcttgcttaatataccagtttctactccaaaatttatgtataaacttagcagtaagttgtcttttatctctttcacttatatttaactttattcccttactaggtttcttatatatggaaatcccttcgttttttagcagtttttcaacttctgataaatccctttcaatagttccacgacttatatatagttcatcagaaagttgttgtatagtaatataatcattactctttaaaagtactgaatatatatagataactctctcctctctggttgtaggaatttgacttcctttattatctaggtaaggaagtattttttttaaatctccatcaatataaacacctatcttaggttttcttattaaagaaagacctatctttttaagcactgcttctacttctttaagagattttgaaactgttttttctgaaacatctaaatcatctgctattgcttttacagttgtatgaccttcttttaataaaaactttattattttaatttcacgattttgaatcatatcagttaacattttcaattttactccttccctttatctttattttaatggaaaatgtttttctaaaaaactactaatatttcctgattaaatacggtaatttttatgtattgaacactttaattttagatgataaattaaaagctgtctaaatttaatatgaaaggaaatagtttaatgctgacaataattattgctttacttcctgtaatgggatggggattgatgcccatagttgcaaatctaaagaaaagttctcctcatgaacagcttttaggtacatccataagtgcgtttatattttccactataataactctggttatacatcctgaaattacatttttttcattttgtataagtatgatttctggcatattctggagtttgggacaattaatgcagtttaaagcaattcaaattgctagtgtatctaaagtaatgccaatttcaaatggttcacaattaacttttacgacattattagctgtaatcttgtttaatgaatggaccagttctaaaatgttactgattggttctttatcaatattatgtataatacttggtatacttctcactaattatcaaactaaaaaatctacagataaaaatatgttaaaatgtgttggagttgtattattatcatctctatttttatcattatatgttgtaactaatcaaatatttttaattgaaggatatagaattatattacctcaatctgttggtatgttgataacttcatctattattgtcaagtatttttctaaagagattgtatatagggaaaatgttttattcaatttaattactggtatattgtggtcaatagcaaatttaggtatgttcataacgactaatacattgggagttacaataagtttttctatctctcagagttgtgtgatagtagccactttaggagggattatattttttaaagaaaagaagaacaaaaaagaatggcttgctatttttattggtataatactaatcatgtctggtgtctttatgttgagtattataaaataggtatttatttacactaatcatatatagttttgtacatataaattaactgtttctatttatttaaataaatttgcttatatacttaaaataatagcatatgtatttatgaaattaaaccacactctaaatataagtatatttcattaaatacatatgctataaatttttctatcaatacgagaatatcaagtatcttatactataagtaaatttaactttataaattcaccaactaatattacactatttgatattaagtttttcatcttctataagcttatctgcaacccactctgtaacttgacctgttattttaatacagtgctcttttctttcgggagacataaagttatcaccatcccatttctttgtaatagctctacaacatgttgcaccatactcttttttaatataatcatgcaaacctttagcatgctcaaacatctttggattcatagtttctccatgtactcttccatatactatacctaaagccatctctcctccagatatcgctccacaaaggcattgagcttttccaagtcctatcggaaatcctgatgctaatttagttatctctggacttaaaggttggcctaaagcatcatttattgtctgaagaactgcttcagagcaaaaaaactctccttttctaaagtattcttctgatatgtttctaacttcttttaaatattcttcttttgttttcatttgttttcctccaataaaattaagctaaattaagtttctatggtttatcttatcttcatatatttatatcaatattcctattaaatacacatatttaataattcttatttagctttagatgtagtttcagatttactaagatatataataaataaaactaaaacatataaaataatcactgtagcaattatctcttctaacttagaagcatatgaaatccaacttataaaatgacctgatttagttaaataaccattcattagtttcatacccattgcacttattgccatagggaatgtaaatgcagcaaaactcggataaaaaggcaatcttaataatttcggtaagtatcccaaaactataatataaaatacaattgataatatgaataacaagtataatactacattatttttatctgaaaaagaattaatatatccagacaataatagtgaccctggtgcagctaatatagctatacttggtaaagatggttcaggcatttccttgattatccatactctctttaaaattactggtataagaactatataagatacaaatcctatccaaaaagcaattttgccaatcaaaagttgattaaatgctggtgccgtaacactagctgcaactatcccaacatatactatataccaagatggaaataccgtttttattgagaatttaactaagaacttcttactaaataaaactattaacacaagatgacccacaattcctatgctccaaatcataatacttaattctaaagataatggttttatatatgtagcaaatatcattgttgccattgttatagttggaaatgtacttgatattaaagggttctctaattgctctttaacaccctttctaagtaatattattttgactatataaattgcatacaaaataaatcctataaatccaattacattacgtaatgattcactataagattgtaataagttacctaaagtaaaaattgacaaaatcaaacttgcaataggtataggatatttttttaataaattcaagttctgcctcctttgttactaaattatttgtgttttaattatatcaaaaagatggtcaaattgacatattatgaccatctttcttatatagaaaatatctattaagtttaattttgttatcaaaagtatctatattcttgatatattaaggtaattagtatatttattttaatcaaatatactaatttgtttattcttatctactttaatagtcttcatatctctaatgcttatttttgcatcatctcttaaagtatctatgagtaatttattatcttctttataaagcctacagttttcttctacttttgcataattaaagttagcataacaatacagacaataatgtctgcaagtattgtattgtcctatatcgacacttttaacacatccacaaatatctctttgtgtactatctttttttacctctacttcacatcctataatttttgatattaatctatcatcaatacacttactttttccaatcccaaatttacttaaattatattcttcagaacacatttcaagtattatcccatgcttatgagcaatcttagaaatttcttttgataatgtttctatttctgtaatttctattggctttatatgtaatgctttagtattaaattttgttttcttatataaatcgataaaacttattatacatttttctgtaaatccatcaagctgattacataaactcgcaaatgctttgatatgataatctactgtgtacttttcacttaagaaaatcgggtcgtatcttaaaattactctttctttgcctatttttctagacaattccttaaatgaatctattacctttcttttatctaaaatacatgtctctacttcttttccatatgatgttatagtatagtgaaaataatatttatagtcttttaatttatttaaatcatataacattggagttacatcctttgtccaaaatacaaaacaatcaacagtatgtggatttaactctatcttactaacctgttttggattcattggattaattacataaacaaaaccttctttaagtctgttaaaaaaccacttactatagaaagcaggtatatcagttcttctactcacacttactatcatatttaacctccatagtaatataattatgtcctaatatatttttaatataattatagctctaaatacttaatttaatcaaaacatttaagataattccagtatgatttactgattcatttctagcatttaaaatatccttaataaggttataattctttaaaaataaatatacattattcctaaactttcaaaactaattttataatgaaactaaaaaaggtgctattttcaagcaccctacaattttactttttaacaaatttaatactatacaaatataccaatattacattaaaggtaaacactatatattaaaactttatatcattatataatacaaattttattttatttggtttgttttatctggttcatgatgtttataataatataccgtttcttttccaattacttcagaaccaagcttctcccattttcctccatagctagtctctatttgttcacattctgaatctgttgatgctacaataagaccataattaggtctgaatatagctgtttcttcctttccatttttataacttaatttaccattatttaaccttaacaggtttccattcttttgataattaaaattaattccattaataacttctggactagatgaatcaataaatatataattgttaaagttattttttaacattaaattacctcctccatgtaccgatttaacgatataatcataggcatctatattgcatctcaatgttaattttggtatttgaagggttttaaatacataaactttatgtttatattctaagccatcatcccagttatccttattatcactaactaaatcaatattacattctgtaaaataatttccataaaataaagaatatgcttcttctactctatctttaatacttaaatatgtgtcataatctgtattataataatactgcccacatcttcttataataccagaaaaataactacctttcactgagtcaaataaaaaaccacaatacccacattggtcaatcgtaatattattaattttataacttccatatccctcataatccttaacttgactacttataagaccaactttctgtattttttcaattcttacattatttatgctagttccagttctaatcctcattccattttgacacttagatattctactattagaaataattgtgtctattcctgtatcaatacccaacccacaagatgaaactgtaatatcatttacaattgagtaatatggtatcctaattcctgtacccgaaaaaccacttatataaatattttcataatgacctagacctttaatcatattcttactattatcatacagaattgctgatacattattcatctcaacatttttttcattcttattaataatcatctcataatgatatttaggattaccttttgtcggtggttcttcatttacctgtatctcacaactatcagaatagaaatttatatttttaatacattgtttcttccctgtcaatgtaataatactcatattttctactccacgagttataaattgtgtagtctctgtaggtgaattagaatcaccttgtaatacaatttctttattaattttaacaccacttgtaaataagtattttccttttggaaaatataagacacagaaatctgtttctatttcatcaataatatcctgtaaatcaggacctatgttgtacgaaccatcatttttaatacctctttctactacattaatccatcttccatctttaatcccagttcttccttccataatattatatattcctttcccatttacttaatttgaacctaccatgactaaagtcacaggtttactacttcatagaattttacataatcaaattaattttttatattatttttatattattcaatccatgctattaccaaaccatttacattaaaactatagtcctagctctccaataaaatacatctattcaaatactacgtatttacttatttctctatcaatttataatagtgtacagttattccaaactctattttttcaccaattttcccccatgttcccccataatgagcggaaagtatattttcatctttaataattgttgacataatgtcacctacctctggtttatgcatcttaataaccttatccttactatttatatatatatttcctttttttatcttgactttatccccataatcttcatcagatataccaattccattgatactacttagttttccatcgtaaaatataacagtttgtcgcatattattgtacgttaaatttcctttttctgacttaacaatccagtcagtagcatctatattgcatgttaatagtacattcttggtttcaagtgcttctacaagatacaccttatgcttatcctctttgaaatcttcccaattatctttattggtatttgacaaaactatattacttgactccaataaattaccatagaataaagaatatgcttctttaactctattatccaacattaaataattatcatagcttacatcataatagtactgtccgcaccttgtgatatttcctgatatctgaacattggatatagaatcaaaccaaactccacaatatccacattggtcaattgtgatatttgtaataaaatttaaacctctaccaatatttttaattccaactttttttatttcttctaccctcataccatttataaaagttccagtagaaattatcattccatcaacacagccccaaaccttactgttagcaatcgttgaattttcccctgtactaattccaagtccggatgtaaaaactgtaatatcatttgctgtagaattattaggcatatcaagtgcaattccagaaaaaccactaaaaaacaagttttcataatgacctggttctccctgtttatcttcacatacaatagccgatatatttctataatttataattacattatgatgaaatctaggttttccatctgttggaggttcatgattagatgtcatatctctatcacaactatctgaataaaagcaaatgctcttaatacagtgtcttacactttttgctgttataattgctatattttcacttttaggatttttctttcctttaaaagtaaattgtgttactccagcagtgtttttaggaacattcgccaaaatataagaatctccacataaggttaatcgtttcttaatcttaacaccactttcaaataagtattttccttttggaaaatatataatagaatcttctggtgcagcatctataatctcttgcaacttggaacttacatcttttgtttcatcattacaaatcccataatcaagtacattaatccagccacttatatctttaattattatagactcttccattaatcactacctcctagtttgataatttaatcttttatctttttataatagtacatagattccccagctaatacttttacatcaatctgttcccatattccaccatgtaatttatttatttcttctatagaatctagtactgaatatattacagtattcttttttaatctaggaaccattaagtacttacctttatcatctatatacagagtgttctcgattattttgattaaatctttttcatctatatcagaaatttgaacacctcctacagaacaaatctcaccattataaaatttataagtattttcaccattttctagcaacaagttgccctttgcgcactgtataagctcatctgcttcagcataacatgttaacattactttgtttgtttcatttgccttgattacatatatcttatgttcatcaagtgaatcattttctaaggtatcaatattactattcatcaatacaatattgcaattttctaaaatatctccataaaaaatggaataagcttcttcttttctatcttccatattctcataagtattataatcaacacttttataatactgaccgcatttagtaattctggcagttatctggctataacacattttttcaaacataaatccacaatatccacattggtcgaccataagattcataatcaggttaaaaccaaatcctttattattaatacctatttctcttatttcttctattctcacattatttaagctaacaccagtagtaatctccattccatttttacattcataaatcttgctactagaaagcattgacttctctccaagcctcataccaagaccacatgaactaacaatgatatcattgccagttgaatagtatggaatttcaatccctattcctgaaaatccagaaataaacaggtgttcaaagtgaaatagtccttgtgtttctccatattctgtaatagcagatacatttttaggtggtattttctctatatcatgactatcataataaaaattaatatttttgatacattgacttgttccttccaatgtaataatacttatattagaaactcctcgggttataaaattggttgttcctacgattgattgttttttatctaaatttgatacttgattatctcctccataataagaatctccttgaagtgttatttgttgactaattttaatacctttctcaaataagtaattaccttttggaaaatatataatggaaccttctagtgacttatcagagacaatatcttgtatcatattacttacatcatatttccaagtaatatctattttactgtttaattctagtacattaatccaatctggagttttagtttcaatttccatgattaattcctcccttttaaatctaaattcttttcacagaaaaaattttttgactataaccgaagtgacttttactctttttgggaattttgagatgacaattttcattttacaacatcattacagttatattataaatcaattataatctcattatatttttactattagcaagttattcttaattttttaatacaaattttatataatgattaaaatagttaagctttgtatcaatataatttaatcccaatagaaaaacactcatttctgagtgttctatacaaatttttattttgagaaatcttatataatcttacattttaaaaattttataatattcaatttaataccttctctagtaaagttatttttgatttgcatatcttaatgaccatgggcaactcatcatacacctcaatgcacaaaaacactttgaaacatcaataatagattctctttttccaggtaaagtccattcatttccatgtatagcttttgcaggacagttctctacacaaacattacaatttaaacattttgaatcaatcaaaggatatctttcaacagaaattggagcatctgtaagtactgtacacatgctaaaagcacatccgtattcctctgttacaaacaaattattttttcccataaatccaatgccactaatatttgctattgtcttatgtggtaaaggactaatccctgattgcatttctggattaatataggctttttcaaaatatccatgttctagattgtttttctccgattgagaatacgctctatatcctttattttgaatatattttgaaatccagtcagctaattcttctactttctcctctttttccaaaaactcatcactatctgtaggtaagttattgtatatatctgtaataaatttttttgataaccctatacaaaataaaattgctttagaaaaaccttgtgtttgatttattggaaattcagatatatcaacaaagcgaacaatgtctacacctttattgtataaaatagattttaattcatcattcatatttaactcctcccccctagataaaaataacattacacattagtaaaatttattattttaattatgttaaccaatactttgtacattctttatttctactcataaagccatactcaattaaatatcttctaattgttgcaaaatcatcatatatagattctaaaatctgattaacttccttttctgaatatttcttcccacgttcaaattgttccaaaatcttagataaaattacgacctttttcttttcttttgaagaaaatacttttaattttaaaggattcatactttcaaatgatgtatccaaaatgtgttttctctcttcttcagttactacatatctttcatctaccattcgagcatgttcatggattggtattatagtactacttttattagatttatcttcaaatacagattcatatagtgctaaatagagcttagcctgttttgctttttctctgaaaataaatttttgatggcgtatagtagatgtggatactccaacctgttttgctatctccttatctggtaaatcactaataaataattgaaataattgtttttgattttcagtcaatgtgttgtactttgaatcactattaagcaattgctctaaataatcactatgttctaattccatatgaagttcaatagcttttgaagcttcaaagaatctattacctattttatatatttctcctacctcatatgtttttgtacatttaatgcaactataacaatttaaatcatcattaaatatatagcctcgtttaatatcatcaatagaaagattttcaattttcatgttactacctccatttcacaatttacatttttcataaatatattatattaaagtttattaatataatcaacatttttattttttgtttatcaattctaattatttattaatttgaaattacaaaatataaaaatatatttaaacaaaactatttagatttttagctatataaatacttatttattctatttattactaagtgtttttctatataaatctaaacaatatttacaaaataaaaaaactccttaatttataattaaagagttcttttttatacaataaatccatacaatcaatcttataaaacataagtttataggtatttataaatattaaccttgtattttaattctttatttaaactcaattacagtatctttcccaccttcaacgctattgcctacattacatgtattcatattgtactctgaatgattagttattgtaactggagtaataagtgatataccctttaattcaatcaaaggacggttaattttcaacattggtgttccttccttcacttgttctcccatactcaccaatgcctcaaaaccttcgccttttaaatttacagtatctaaaccaacatgaataagaagttccatcccattttctaattctattacaaatgcatgtttagtctctgctactactactatctttccattgattggagcatatacaatgtctcctgtagaatctatagctacaccctctcccataattttttgagaaaatacaccatcttgtattttagataactctattacttttcctgatatgggtgattttattgatttttttttaaacattttgaacataaaaactactctcctttttgcttttatccattgttagctgtttttaacttctcacctaaacttcctcctggatggtacttataaaaatctgaagaaccaaaattactactcttagataatgcacatgcaatagaatctcctaaaaccaaagtaattgtagatgatgttgttggtgctagatttaaatggtctgcttcatcctttgcaggatatattaaagcataatcacactcttttgccagtactgaatttctgtttgaagtaaatgcaattgtcttagaacctattgctttaatatattttatacagtttaccacttccatagaatttccactatttgatattaaaattgtaatatccttactttcaatcattcctaaatctccatgcactgcctctgttgcatgtacaaaaaagctaggtgtaccagtactagcaaatgtagctgccaatttcttacctatatgtgcagattttcctacacccataaaaattactttgccttcacaatttgcaatttcactaactatactttcatattctattcctgcttcatctattaaacatcttatggcattcatttcagtagtcataacatcaaccattgtttttaaatatcccataactatctcccttcctactataaagttctttttgcaatataatccatagtttttttaatcctatttaaaccatcttcaagtttttctcttgaacatgccacatttaaccttaaataaaactcaccttcttcaccatatacagaccccgacataatagcaacttctccaatatccatcaataatttttggaatttctcaccacttattttaagttcggaaaaatctatccaagcaaagtaacagccttctggcatgaccaatttcaatggttctaaattatcttttatataatcaatcgtatatttaagattctctttaaggtattttaatagttcatctaaccaatattcgcagtcatcataacagaccattgtagctaatattgctagaattgctggcgaatttacaaaatcacggtatctagtgatattttcaaatttatttctaataccttcatttggtataatcacatatgacccagtcaatgctggtatattgaaagatttagacgctgatgtacaaatgaatacagaatctaaatagtcctttgcaacatttaagataggtgtcattctattgtcatatacaatatccatgtgtatatcatctgatattatcttgacatcattattcttacaaattcctatcatcttaacaagttctaactcactccatactctaccagttggattgtgaggattacataaaataaatatcttagattttttacactttttctcaaaatcattaaaatcaattgaatagaatccattcctatttacaagatgtgactttataatattacgattgttatttgttatcacatcataaaaagcattgtatgcaggagtatttataaggattccatctccttcattacttaacatctcaataagtttgctaattgaatacattacacttggactataatatatccagttactatcaacgctacaattaaatcttttaatataccaattcgtaactgaatttctaaaatcatcatgtttccatctactgtatcccaaaactctatgatttaacctttcctgcaacacctctgttatttcaaatggaaactctaaatccatatctgaaattgtaaaaggaagcaaatccttcttaccaaatctatcttctacatagtcccactgggtacaatatgtacccaatcggtctacttttttatcaaaattaatcattacatgcctccaaatgaccttccatagctttatccatctgctttcttaaagaatacacttgagttcctataattacttgtattgtatgctcatccaatttaacaactgctataccaccagcctctttaattgcatcctcatttattaatgatacatcttgtagttttaaacgcaatctagttacacaattatctagtgataatatattagattgaccacctaaagcagatatcatttgttgtcctttatatgtagacaaatttttgaaatctgaaccatttccttcagatacttttatttctttatcctcacgtcctggggtctttatattaaacttaataattgcccacttaaatacaaaatagtatattgcaaaatataaaactgctactaatactgctattggccatcctgtagctgttcctcttaacacaccaaaacttataaatgcaattaaatctcctgtgaatcccatcaacacgcctaagtatggaagtaccatgtttgctagaccattcataaatgtatggaaagcaaataatgctggtgatatgaataagaatagaaactctattggttcacttataccacctataataactgtcaacactcctgatattaaaagtcctttaagtgcctttctattttctggttttgctgtacggtagatagccaatgcagcaccagctaatccatattgaatcatcaatttaccttgttccattttaccagctaaatcaagaggtataatctgattattttctacatatgccataaacatgttcaatgtaccaaagtacgtttctccatcaataacagcagttccacctattggtgtaaaacggaatacagatgttacaagatgatttagtccaaatggaattgtaactctttctgccactgcatatgaaaaatatcctaatggtcctgctgaagaaatccatcttcctaaactttggaatgcattgaaaaatggtggccaaacaataggtattaataatccaactatactcataactattaaactaacaattggaactaatcttggtccactgtagaatcctaatgattctggtatctttaaattactaactttatcatatattgcataaacaattaatcctgctacaataccacctaaaacacttgtattatatgtttgtatacccataatcatagcttgaccattagttgacatctgttctgctggtactaacaaatcagctcttgttaaataaaaatttgtacctatatgcattgctataaatcctactaatcctgaaaaagcaccaaactctttttctttttttaataatcctagtggaattgccattgcaaataatgctcccaagttgttaaatgcaaataatcctattgttaacatgaagtttaaaactaagttaacatattcattccctagaaatggaaccatttcaatcatcttagggtctgtaaaacctgccccaagtcctagcatcatcccagaaacactaagtagtgctattgggaacataaacgttttccctaacatttggaagaagttccataaacctaacttattttttttcataattttcccctcctatttttatctaaaaacataatcaaatttatagaaaaacctaaatcaaaaaacttaatttaataattaagtttaatgatttaggttttgcctgctcaaccagttacaatcctaaaagtcactgtctgtatttgattgtatctaataaaaaaacctaaatcaaaaaacttaacctaatagttaaattcaatgatttaggttttgcctgcttaaccagttacaatcctaaaagtcactgtctgtattttgattgtatctaataaaaaaacctaaatcaaaaaacttaatctaatagttaagctcattgacttaggttttgcctgctttatcagttacaatcctaacaaccactgtttgttattttatttatgtgaatcattaaatataattcttcttctttactaatcttatattcaaatctgtctaataccaatgctgcaatttcttcagtacacactttaggtttattgtaatttttattcactaacttatacatatcttcaatatcactatcattgtaagtttcttttcggagaatcctttgaacaaaaaactttaagtgagttataagtctagtataatttaatgaatttacatccaatttaaatccatgtacttcttcaattatctgaataacttgttttgaaaactctagtatattaataccttcatctttttgagaattttccaaaccattgattatgtgaatagcaatatatcctgcttcatcttcaggcaattttattcctatccttttttcaatttcatcaattgcccataatccaaatttaaattcttccctataaagttgttttgtctcattcaatattaagtttggtaattttataccttgtttttctctttggacagcaaattctatgtgactagttaaggctaatattattgaatcattcacttgagtatttaaaacttcattagccttttctataatttcttctgaaattttaaagtattcaatagaggtcttattaagtatttgattgtatttgtccctttgatcgtcttgaacaaaatatttcttagaaatcaaattttcatctatcaaatcgcctacttttttcttaaatcctactccagcaccagtgacaattatttctgtgccatcttctagggagcttactactacattgttattaaatatcttttttatattcactataaatcccctctaaaaaaattctctcatcacacttacatagtatagtatatttaatttaatgtcaatatttaaaattttactttcgtatatattttgcaatttaccctataatactacaataacaaaatattttttattgtcatcaattaatttgtcatattttatcatattttcattgaaatatatttaattatttcttatgtatatttaattatttaaaatcaatcgacattttatattacaaaaattattttcagttttttccagtattctcaagtattttaacttaattatatatatatttattgaaattcagattatagctttgtactaatcttttctcaaatatatacattggtaatataatttttaatttatataaattaaattaaatttttttataattttttttataaaattatttgtattatattttgtattttttataaaattattatacttgtacatcttttataacatataaaatctttttttctaattatatacaatatattttccattatgttctaatcaatttctttactatttttacaactttattagtcatattcataattatttctaattagtgtttaacattttatgtaaaatttataaaaaaatgtatataaattaaaataagtgactatactaaaaatatgatacggataaacaataagttcaacctatctcccccaaaatcaagtgagctacagtttcccccaactgtagctcattttcgtgtaatttaataaacatctcaacaagaattaattaacaaaaccccttataaaaacataacatatattaaacaagctcttgattaaaacttgagcttttttaataaaaaacagaatagtttattagataaggggtttttttatgcaattcatggatgtatctaaatacattgaaggtgcaaaccttaaagttaaaactaaaaatggtgaaactgttaaaagaatatattttaacaactctgccactccattagttttaaaaaacgtagtggataacttaaactgtgagattccttggcttacttatattaatgctccaggaataatctcagaaaaaaatactttaaaatatgaaaatgtacgctctactatcctcaaacttattgatggagacgaagaaaaggattctgctatttatgtcaaaaatgctacagaaggaataaacttcttagcaaaattttttaaagatgaaaatccagataaatttattattaccacagcaatggagcatatggctaattacctaccttttaaagttaattttcctacaaaagttgttggaattacagaaaaaggagaacttgatttatgtcaattagagaatatacttaaaaattatgctggtaatgtatctctcgttacagttacaggagctagtaatgtcacaggtataaccactcctatatatgaaatagcaagaatagctcataagtatggtgcaaagatattggtggatattgtgcaagtaattcagcataaacctttttcaatgatgccacatgaatgtgatgagcatatagattttgttgtttttagtgctcataaatgttattctccactaaatggaggagctctggtaggacctaaaaaattctttgaaaaatttaatcctgtactatatggctcaggttctaccaaatttgtaaatgataacaaaatactatatgcaaacgtaccccaacgttttgaagcaggatacccagagtattttggaactcttgcaatgggaaaagcactgaacactttaaataaaattggtctaaacagaatttcaaaatacgaaagagaattatttttatatgctaaagaagaaatgagtaaaatacctaatataataatatatggagataaatcaaataatgtaattatcccaaatatatcttttaatataagtaatatgtattacaaagatgtagcaaaatatttagttgataactttggaatagaaactggagctggagtagtaggtgcagatatttatgtacaaaaattattaggtataagtccaaaagaagcatacgtcagatttatgagggaaaatcctgtaggtcttgttaggataagcttaggaatgtacaatacttttgatgaggtggatagctttatacatgctattaaaactttggcttttaaataagctttttctattcttttttatcaataaatagagagtagttttgttttcacaaaaaaacaaattatatcaacagtcaatttcattagcaattagacactcatttgtaactatacaaactattttacactatacaaataaaaaactcattacaatgagtttttttgtttatatatgatatttattttaattacttcaatttactttaattacatatatgattcaattttgttttttaaattctccttaggcataaaacctattaatctatctacaggttttccatccttaaatattagcatagttggtactgtagatacttcaaatttctgagctaattctatactttggtctatatccaccttcaagaagtttgctttttcaaccatctcatttcctaaagcttcatatattggtgatagcatcttacaaggtccacaccaagtcgcaaagaaatctacaactactaaaccatctttattttctacttcatttataaattcattattatttattatttttaccataatatacatctcctttattatcttcttgatactaatatactacgccctatataacagttcaattaggcacttttttgtaaccgcctatttttaatagatttaatattatgataaatagatttataagattaaatatttataagactaaatatttctgatatattttatttttttcttaatatagttgacattttctcccttaaattataaaatcaaattaataactacataggtagttactaatcttttatcaaaggagtttctatatggataatataattaatgaattacaaaatataggatttactaaatacgaatctcaaatatacatatcattattaaaggaaagccctttaacaggatatgaaataagtaaattatcaggtgtaccacaatcaaaagtctatgaaaatataacaaagctattaaacaataatataattatcaatgttggaactgaccctattaagtacatacccataaaccctaatgaattattaaaaaataagaaaaaagaatttgataattctatggataatctaaagaatagcttacagatattaaataaaaataaaagtgtagaatacgttttaaacataaaaggagataaaaatatattaaaaaaagcattagaaatgataaaaaatgcaaaacaagaaattataatttcttgcccttatgaagaaattcttgaattaaaaaaagaactcctaattgcttacaaaaaaaatattaatattgaaatactacttttagaaaacaaaagtctgaaaggtcttgataatattcatactcatggaggtaataaaactacacttgaaaataaaatgctttacaaaggaattattttgattgtagataatgatgaaatattgacaggaaacttatcagaaggcagtgaggccatttcaatttggacaaaaaactctaacattttatatattggagttcaatacataaaacatgaaatttatatttcagaacaaataaaaggaggttataaaaatgaacaaaattaagattaaacaagttgatgcttttacaactataccttttggtggaaatcctgctggtgtcgttactgatgcctctaacatttctgatgaaattaagcagaatgtggctaaagaaatgaatttatcagaaactgcatttgtttcagagtcaaatgttgcagattttaaggtacaatttttcacaccaggtttagaagttgatttatgtggtcatgcaacaataggtactttccatgcacttttggaagaaggaaggcttaatactaataagagtatattttatcaagaaacaaaagctggtgtattatctgtagagcttaaggaaataaataatgaaaatatatttatgatggaacagaatacacctgaatttgaaaatttagataattacagaaaagaacttgcacaaatgataggtgtgcatgaagatagacttcttgaatatcctattataaaggtaaatactggactttggtggcttgtatttggtctaaaatctttagatgatttaaaaaatatctctccagatttaaataaaatcaaaaaatttagtggtgataataatataattggtataactccattttgtatagaaactatagataaaaagtgtgactaccatttaagatctatagcaccatatgttggagttacagaagaccctgtatgtggaactgggaacgcttgcgtatcatcttatatagtacatcacaatattttagataaaactagttttattggtgagcaaggtaactttataaacagacctggaaaggtatatgtaaatataactagagaaaacaatgacataacttctgtaaaaattggaggaagtgcttatactgttttaagtggtgaaattatgtattaatcccatacctaataaaaacaaataaaaatactagctaactaaagctagtatttttatttgttatttttatttaataatcacactctaacaaatattataattatatatatcataatattgtatttagaagtaaaattttatttttattattaattagttataaatcaatctaatacaacataattacagtagattaatctataaaacataataattacttactgattatttatcatcctcaacaagtctacttaatgtcttatcagataagaataataatatcgctgcaacaaatagtattactggaattatagtatatactttaatcatatcaaatttaagagtaaatgcatatatatatccatatcctttaccagctataaaagtagcaaatgtccatactcccataagaacacctagaagcttcttaggtgcatacttacttacaaaagagttaccaagtggtgagaataacatttcaccaagacttaaaagaataccaaacatgattatccatagtatactagctttagcagtttcaggagctccaactcctcttgaaaattctgcaccaacaagcattaagaatgcaagacctaagaatattaatccaagacctgtctttttaaataaactcatatctccttgtggtctactagcaagtttaaaccataatgctccaagaactggtcctaatactatacatacaagtgaatttaatgagtcaaaccaagcaagaggaacatcaaatcctccaacattcatgtttacaaatgctgcaccataatcataaactgcaagataagttagataccagaatacccagaaaattacagagaagaatgatataagtataatagcccaaattctcttcttatccatgcttgtaagaggagacttatctttttcttcaactttttcagcaactacaccttctttaaaaggtctctttcctgcatttccaaggaatctccatccatatatgaaccatattgcacctattacacaaagtacagctgctataaagaaacattgagaaaatccaagtacaccattttttgcaaatgttttaaggtaaagaataccaactgctatagtaccaataaaagaacctatattaacaaaagaatattgtactgaaaatgctgtatcaagttcttcttgactatcaaaaagctgtccatttaccgcagatacgttacctttaaagaatgcagtaccaatcgaaactaagattatcattgcatttaccatagaaactgtagttgcaatagaaccaagatagtaacctacccccatgataagcatacctataggtatagtatatctagctcctatccatctatctgatatatatcccccaattataggtgcaaggtatgtgaatgcaacaaggttggcttgcattatagcagcttgtcctttatctattccaagaccaccatgaactatagctgttgtaaggaatatatatattaagtactttgaagcataatatgctgctctttcaaatgagaaagttgttgagcagatataaaatcccataggaaatttacccttcttttttactgttgagctcataattttaaatcctttcttaattgtatttttattttttacgttttgtccaaattctttcttttatgaaagatataatattattattttgtaaaacaatttgtaattattattaagataattgcgcatttatttgtagagtacatattctcatggaataaaattaatacacttcttaatcataaatttaaattatataaattcactattttcagatatagttataaattaatatattctcatctaataccatgaaaaaaccttcgccatatgcaattcttattttttacgtgatagtattttacaaactaaaatcccccttttgtagcaacttctgtaattacattttagtgcttttttaaaggagtctcgaataaagcaacatatattttgttcaaataatgtttttatttactttttaaatttatatattacttcactcaaccaattctcaacttaaataaataaactactatctattcacagattagacctatttcttacacattagtttataataaacactgtgaatctaaacataaaaactgttattttaaagtaattacccatatattcgctttgatactatttattgaggttatactctttatttataatatattatttataaaatacctcaaaatatattattaataaaatacctcaaactgaaaactttttcacgaatatttatttttcacctccccttttttattttaccatgtaaatcgtaccataaatatgcacttatatgcaagaaaaaaatctattaatcgacagtaaataattagaaaaatttaaattatatttgttaagtgtattatataaaatatttcctatgaaaatataaattaaattaatgttcagaatagtttttagatatgaaatcttgatttttttattactttacttatttgctcaaatatatttttgtatgcagtatataataatcaaattatacacttcttataactgcgttgatttgaaaataatattaatagttaatagaagaaaaaatttaaattaatttttaaaaaatctattaagttaattgaatacttttttatgtatttaattaattttataaattcaattattttctaaatttaggtatgctttactatataaaaatgattttttatcttaattttctaaatataagtgaatgctatcattttaagtatcttataagcaatgtaactatatatctctaataactacttttttaacatgcttaaactatttataagctattatatttatgtattaacctaataactttttcactaaaaaataacaatctattcaaagataaactatagtacttcttctactttgtttcaataaaatactaaataaatttcgtacatccacaatttttcaggctacactataaatatacaatatttatcttagttataagtttaagaatatttttagtcttattttgtcgaatatatttttaataaaacttcataattctaagcatatttttacactgtgttttcatgtacaaaaataatgcttacaaataaacaacataaataaaacttaaataagatggattctattcaacatagtatccatcttattcattcaaaacctaaaaggattttttataatattatatattttaaaatctaagtaactcattatagtatcaatttcacttaaagcttacaatacacttattaatcttgctttatattaaaaacatctacaataacaatttaaatctttaagtgatatccatctcacacctaaaggagtgggctctccgcactattctgtaattcttcaatacaatcattcttaattttttatataatttaattatatattttattttaccaaaaccagcatacataaataatacttaaaatagattaaataaaggatactaaaacactttattgaggtatatgacttgaaatatatgaactaacttcattaggagaaatatctaaaatagttgcaaattcttcacttaataacctttctgcttctttcattatattatcatctgcttgatgtgtttttttaccaatagattttacatactctctgttattatctatacttcttactaattttattaactcttcacatttaccacctctgagtatttttttaaattgctcacttcttaatttttcattatctatccatgatgtatccatattaggaatatcatttattaatgaaagcacattaattttagaaagtaactttctcattggtactttttcattatctacaggaatttttattactgtattattagaataaataggactcaatacataatactctttttttattccatttgtaaatcgttcatttgttatatccatgactttgcagactcctgtcataccatacattatataatcatcaatcttaaacaaaaacatcaccatccttaataaaaaaaatagttttgacaactaaatccatcttgccaaaactatctgctatatattatattttaacacattttaagacttaaatgtaagtaaaacttatattattaaaattaaaaaatacattaaccattgattaatgtattttttagatttttataacaagcatatcaaaataaattaatacagcttatctcctgtgaatacctataaaattggtgcttggctattcattgagtacccatcatttcttacatcatttatttctaatatttcatcatttgttttaaccttagtaagttttttaactgctccataaggttcttttaatgaaattttatctcctcttccagaaataacccataaaattttataccctctaggtattacttgtagtttattttcacctttaccatcagtaaagtagactaacaaattaatctttttattattagcatactcaaagactggagaaaatctagtacctccacctatcctaattctatcttttatatctttttcagttctcactttatatacacgtctaatttcattatcacattctataattgtaatttcatgattatagtttttcactatactaagaacttctttaatagcttgtttaaattcttcatcactaatacttccacttacatcaagtgcaactgctatttctgccttatgacttctaagttctcccctcaaatctaaacgatttggttgtcttctatttcttcttgttatagtcttctttttattattttcaactgttcccattattctattaagatataaattccatggcaattcacccttactatttttaagtgatgatatcatactttctaaataagcaggaactttacctttttgagaactgttaataaatttttcagtaaattctctaagggtatttttatctatctcattggattcatcccatatatcatgagttctttcggggctataatcaatttctacatctccatatttatcactatcatcttcctcaccatcttcatccacttccatcaaatctaattcagtctgaatcttttctacataatattcaaaaggttcatatggttcaagttttaaggaatattttaaatttacccactctaaggtagttgcatatggtggtaaattgtttagaaatttatttactactatatccattgccatattaattgccaatgtactatactttccttttaactcctttgctctcatcaaatgcatagataatatatgatgaatttcatgtttaattgtagtctccatttgctttatgtcaagcgttaaaaagattattggattaaaatatataacatatttagctcccttaaaattcacgcctgtaggactacttatatcaaatcttatttctcttgacatctgaaacaaaaaatatccataaaaattatcttcttcttccataagacttaaattcactttatctacaagactaaaaaactcatacttaaaatcttgtggtatatccatatcaaatttctcattagcacgatttgcctttagcatagaatgagtatttataatttcacttgctttattataaagctcttttgcttgtttatcaaaataattttccatacattatccccttattaagctataagattcaaaatatgattttacaaaaccttcattttctatggcttttttatatacttcaatataactgtttctaatatccttcataatacctatcattaaatctacaggatacatttttaaaaattcaataaatctattaatatagtggtttgattcatatttatcattcttaatatttaattctaagtcttttagaatgttcatagctgatagataaagtcttgtatgactctcattttttactctttctacaatgggctcatcaatagattctcttaaaaaaacatcttcataggatattaatggttcagagtttgattcaataaaacttataaattcttctgcaataactttacctacattaccctttacaacatttaaaaatactgctctaggaatagaattatttttttctttataaactttataaattttagatactctctcataacttctaggagtagctcttacatcatcttcatttattttatgcagatattctggaaaagtggaaataaactcgataacttttctttcaataccctcatctattgcccattttatccattgtgtatggtcactctccatatttaaccaaacaaacctattttcttgggctgcatccatatctaccacttgataatcaaaatctgaaccatatttacttgatggattcattgctgctaaaatctttacatcatcatgcagtttatatccattaatttctctatttaaaattaaattcataagttcttgctgtactgtatgctcacaacgatttatctcatctataaataaaagaactgtcttacttttagatatctcttcatcaatttctcttaatttgttatgaacagcatacactgttgttttcttttcagtcttatatccattagaattaactcctacataagattctatagttggaagaccacctatttcaccctctttaagtaagtttccatcaataacaattaaactccaatcattttctttggcaagcttatttgctaaagctgtttttcctattccactttcacctactattaaaggtacttctccagtggataatattaagtcaacgctttttaatgtgtctataaaattcatttttctctctcctacataatctttaatttctcatctacagctattttttttgctgtcttacttccatatttataaataaacataattttatctattggtatactttcgctatttctatctataacactacaattcaaaaaatctctaatatacttttcctcaacatcttctttggataatacttcttttaatacactctctaattcatctttagatacttttttcagaatgtacttaatcactaaaatattcacttttaaaaattccaacattttatttttatctaaatcagttataaagctaatagctgcttcattattttttatagctataagttctgcattataactaggtgaatctatatatctcaaggcatcataacttattcttactgcctcctcttgtacactttcataaggttgttttataaactttatcgaatcataattttttcttactgctaacagttgtaattcttcacttggatttttagcatatttaattgcccatcctgcttgatttatagccatttcaataactttatcagttgggtttttgatataatccagtatactccatccctcatttactgcttttatcatcatatcttctgttggattatctataaatttaattgctctaatattattatctattgctagttcttgcatctctctggttggattatttatatattctagtacaagcccattttctttaatagctaacaatttcatttcatcagttggattatctattgtagctataatattgggattattttttatcatttcaataactctcaatttttccataatgtgcctttctttctataattatttttatatctatattaattataataatctattcctatttatataattgtttcttattataattaatatactttttaatcaaatttaaacagaataattataccaatatataaaaaaatttctaaaaaacaataaaattaagttataaacaccaatatatttctattatttcaataagtatacaattagattagaatctaacgctagtaataaaaaattactttcccaaaatagatataagcctcattttatcgttcaaataatgaaaatatatttgatttcatgcaaaaagagtgcctaatgaactaaaaagttcattttgagacactcatttctttatataaatttatatagtttttaatcgttcgcattcaaccactcagttaagacttttatatatttctcattttcttcaacgaatggcatatgtcttgaatactcaaataactcccacttactattaggtattctatcatacatagtctttgcaatatatggcgaacataaatctattgctccactagttactagacaaggctcttttatttcatgtaatctatctgtaaattcatatccagaaagagttcctgtaggagaaaattcattttgtccccatcctacaatatatgcttcagaacctgattttttaggtcttctcaggcactctggagaatcttctgtcacttcacctgcacaatacatttccataaatctttctaatgcatcattatattctttattagagtaatctccagtatttactgcatcaagcaatgctttttggtcaacctcactcatatatgatattcttcttttttgttctttctcccaaagttttgcagaagaaagagtagatgaaaggatgtaagacttaataccttttggtttatattcaatagcataccaaatagcctgcatacctccccaagattgacctaacagatgaatttcatcaagtcctagatgttttcttagttcaataagctcctctatccaagtatctgcattaaataactcaggatgcccttctacaaaggaatttccacaaccaatttggtcatacattattacttgtctaccactttcagctatcttatccaatacctcaaaatagttgtgtgtagaacctggacctccatgaagtaatactaatggcttcttcccttccgtattttctcctactatacggtaatacgttttaaaacctttaaaaggcatatatccttcagtaattttcatatttatctcctccaatttgtaattataaacaataatcaagttcattaacaatactatttaaaacctctcatacgtatttaattatgtcttttaatctttatacctacttttataaatagtataacataaaagttaaaaatctctatactaaaccaattataaaattatattaactatataattttattttttaataatagtatatacatatttgattattttcatttgctatttaaaatcaattttaagttttcttcttataataaacttcctctttgtggtctcatgttagtctctaaatttaaaattttacaaaaaattttcataaaataaaattatattgattgtatctaaacaaatagggcaataaaataattaagtatagttacttacctttcaagcaatattagttttatgttagaattttattatattgatttacaggaggtttgcatttgaataatattaattcacttaaagtaataaaattatctcttggatgttctcttgctatattcattgcttggctattaaaattagaatattcaatggttgctggagttatagtactacttacagtaaaggacactaaaagagaaactcttaaaggctccattggaaagatttatggttttcttttatgtactattttttcatatttatgttttaatattttaggatataatttgacttcattttcaatatttatatttataattataccactttgttttttgttaaatattcaagatgttattgctatgtgtgtagtcatagcatcccattactaccttcaaggagaaacttctatcaaatggattttaaatgaagctggaatatttgcagtaggaactggaataggtgtcttaataaatatgtatattccaacaaatatacataaaatccatgaagttcaaaaaaagttacaggaagaagtgagtattgtacttatagacattgcagatattattgtaaatcctaaaaaagaaaatggatatagtagagatttatataaattaaattcacttattgacagcagtatttctgaaacttacgataatattaataatactttattaagtgatactagattcttcttagaacatatggatattataaaaagccaacgggatatcttagaaaatttgtatagttatgtatctcaactaaattctacaccaccacaagctcacattctatctgctttcatacataaaataggttatactgaatttgaagctgaaacaggcaatcttcttcttgaagaattgaagagattaatgcttagtatgaaaaaccatcctctacctgttgacagaacagagtttgaaaacagagctattttattcctatgcttgactgagttaaaacaatttttagttaatcgtaaacatgctcagatgcttagagataataatttttataaataaaaaggtgagaaatccagcagttgacctgactacaaaatatcagatataatattaaatgcgcccctagtaagagggcgcgatgtttataacttattctactgtcatgattaaatcattattcatatcgaatatacattatttgaccaagtccaatattagctttttcatcagtgatttctattttaatagtcacatcattttttttacagtactttgctaattctgcaccagaacgatttttaccactaaaatctaaagaaaatggcttatcatatttaaaaggatattcaacaggttcaccttctggtgctaatgcaaacatcccatatggtgtgttcataaatcctattacagcaattgtaagatttgatgggtctaaatttgatttactacctagaaatgtaactgtattcactgatgaattaattacaacacatctaacaccttcatacattacatgtttatcctttatatctccaaattttccaacaacctttgccccgtcttgatgtggtaacatagtgtgcttcccaggtagtgctggtttttgcgtttgtgctactgctccaactgttggatatgctgtcttatcaaatggtaatgggtggctaagactcttgtatatgatatcctttcctgctgatttattagcatcaatatctacatgatacaaacgcccatcaccaaaacgtataagattccactggtggtcatttgatgtgctgtgtacataataagattcaattcccatagcgtcacacaaagctttcatgctcctagccattcctgaacatgcaccttttttagtaaccaatgtataggcagtattcgctccttctactgcattccagtcaacatatgttgtgttatttttaatgtgattataggcaactaaaatcttagcgtctgtagtcatgttctttgtaattttattgttcataaaatctgctgttgcttgtgctactgagtttagttgggcttgtgacagctttggaccatatacgctattggttccagtgacatagctttttggtgtttttgctgttacctctttggctgtcataccataaactgtcatactcatacctgagactaaaacaattgttgtaatcaataacttggtagctaacttcctaattttcttcatacttagtattctcctttataaaatattgttacttcctattctctaccattaataaagttcatttgggatttaaaaaggtggattgtcaatatgtatgtttcttcatttatacgttcgtgaaatatttaaatttcatggaaaatctaatagatattttctagataatttgtatacaatacaactcgcaaatcagggtgtttgctgttagtttgagaaaatgatgatgattaatatattcggaatctttgacctataataaataccattgtcttcaatcattaataatggtaagagtaaagagaattatcaataatacagttaaaatcaactttgtatacatttcatacattctctcccaacaacattatacttcttataatttgtatattcaatacgttttctgggaaaatataggatatatctataaaaatataaaaaaggagttgaacttaaaatttgattaaaaaaaatcaattttaagacaactcatttgtattataaaaatgctatatattattattaagtaagtcaatattttagatatttatctatttcttattgacttacgcttatagtctaacttatttgtttagttgatatataacctagttttaagcattattaatatttaaataatcaagtatcctttttgtttcttgtagtttctgttctgcctcatttaagttttcttgaattatagaaatatatattatatctatcaacgtaagcattgctattcttgaagaaatagctccttctctaagccttttttctatatttggtactactagctttaaatcactaatcttactaagatgattgtcactatatttagttatacaaatgaccttacatccttttaattttgcattttctatagactttattacttcttttgattctccagagtaagatattgctatagctatatcttctttatctacatttgaagataccataagttgtgtatgactatctaaagaggtaaatgcctgtttatttatccttaaaagtttcatctgtaaatctagtgcaactaaagccgaaccacctactccaaatatatatacatttttagcctttattatctgttcaactgcttcttttattatatctttttcattcaacaaccttgtttggttgatagtctctatgtttttgtttgtaattttgtttataacactatctatattacaatcatagttttcatctacatatgtgtattcattttctttgcccatcaaatctttagctatctcaatttttaaatccccaaaacccgaatatcccatttttctagaaaacctaactatacttgctgtacttgtttttgagtttgacgccaattctgatacagaaagcttacttatagcctctgtattattaagtatgtaatcagctatttttttatctacttccgttaaatcttcaaatatctgttttaattttaaaatgcaactcatactctaccacctctacctatttactataatatttcttcttagcaagtaaacatgctcctaaatctggagtcaacactggtctcactataccaaatctcgttttattcaaatattttttaagtggctctaatattaaatctcctgacttaaacactccacctgaataagatacctttatctttgtaccttgttcaaaatgatgctctaatcctattataagcctacttaattcataagctgcatcatcaaatattttactagcagtattatcaccttcaataactgcttttaaacatatcgtagcaaactttgctatttctattctatctccttgtattccatcatttacatattttattatgtcataatcattctctatattaagatgtctttttattaaatcatataattttgtctttgaacaccttccatcagactgcattgtgaacatttttaaggtagccattcctatataatacgctgaaccttcatctcctaatacatagccccatcctccacatctgtgaagattcccatctttatctaaagcctgtgctattgaaccagtacctgcaattatatttatacctttttccccatttaaagaacctgctaatgctatttctacatcattacctagagtataatttatatgactatatgcattttttgttgctacttctaatgcatacaatacttcttttatttttccatatccagcaagtccaacaaatgcatacgttatttcttctacatttatcttagcatctttacaaacttcttccaacccagttattaataatttcgttagattatcaaatcctatttgattataatgacaagttcctttggttatggttcctactatatttaattcttcatctactaatgtaaatgttgttttcgttcctccaccatctacacctaaaaaatacatactatcctcctacaatatctttaataattctttcaatacttaatatctaaaaataaccttccaatgctgtttttttaatattgaaaggttatcagtactattatttattttacaatttttctattgattttaaagcttcacttatataaccttcttgtctatctaggatactctttgcactatccttatctaaaccactttttatcataaatatagccaatttaactctattatctgcttcttctaagaatttttctgcaacgtcatattttacatttgtagctatcattattattctttttgctctttcaaccaacttttcatttgatgtcttaacatctaccatcaagtttgagtatacttttcccatcttaaccatagaagctgttgttaacatattacataccattttttgagctgtaccacttttcattctagttgaacccattattacttctgcccctactataatgtttattggtaaatccgcttttttactcatttcactattcggattcatagttattgatagtactgcacaccccaattccttagcatactccattgcacctataacataaggagtccttcctgatgcagctataccacatataacatccttagatgtaactcctctatctattatatcttgctttccaagttctttatcatcttcagcaccttctattgctttaaatattgcttgatttccaccagctattatagcttgaacaagctcaaaatccactccgtaagttggaggacattctgtggcatctagtattcctatcctcccactggtacctgctcctatatagaataatctacctccctgcttcattctatctactattatattaacagcttttgctatactctccttttgttcttcaacagcataggctacagttttatcttcgttatttattaattctattatgcctaatgtatcttctttatctatttgcaatgtattcttatttctaccttctgtaactaaattttctaaagtttttattaacatatcatttcctcattttcttaatattaaatttttaaacacattttaactccaactttcataattatatttttataataaattaatattttcataataaattattttgttgagggtttaaaatcaaacttttgccatggtttaatataatctaatataaataattcttcttttcttatatatcctactacattcgatttaccactgtttttcatatcagtcaaggctatttgtaactcccctgcataatgaccatattcactactttcaattactatatctcctctttttattattttaggagtattaaatagttcaaatttgtatcctttatatttaacacgagattgagtagaccttatcagactgtcagatatatcccctctattaaaatgtatttcttcaaagagtatcttcttctcaacttctcgtatattttcctctattgctacatcaaatgtaaccatatcttttctcatagaacctaatacctttagctcctcatatgttggataacaatttgatattattatatcatttatattattcatagctattatatgctttacttgaatatctataggtagatttctgtgcatctcaattgttggaagcccatcagttacaggccatggtccaaatgtggtttcattttgacttgttacaaaaactgctgttcttaatccatacttattaaatctttctgtacattttataaagtgttctaaatttaatccactatatctatgtggataaaagttatgacatcctgtcaaattttctttatttggttggtagtccattattgtatctatataattagtattattactcatattgatttctattttaagattttgaggattaaaagtcattaaggccttttcagaacctgtaaatcccatatcaagccttattccgtctgccttcgtctttttaaaaaaagtcaaatctttgtagcttatttctaattcaccaaatactctgggatttacatcaagtattacctcaaaacctttaaacttagcgtattcatttatacttttaaattttttaattatattttctttagtatctttaactgataataaacatgaaaatatacgtgtaaatccattttcagcagctttatctatataatcatatatttccttagatgttgttttttctggataaattgatattcctaatcttcccatctgtgtcatctccttatatcctatatgtgtttaaatttatttcgaattacacgaaacttttttaaaaatttggtgaaaaaaagtttcatatatatttataaaaaaagaaaagtttaccttttctttttttataaacaatcaacaaaatatcttcgttacttatttcataactgttatactttgaaatttatactaatctaatatagtttttaatttccaatatagtttctaattaataagcttcttgctcttcaactttttcttcatgaagcaatctcttatcgtacatcttgacaaatggatagtaaattattattgatatagctatacataataagttaagaactgaagctctccaatctccaccagtggctaaatatgcccctactggtcctggtaatgtccaaggagcagtaactactactctggatactaaattagcactcatagcaaaccatgaaactgttgccattactattggtgccacaacaaatggtattattaatattgggtttaatactattggtgctccaaatattattggttcatttatattgaatattgctggtattacagttgcttttcctaaagactttccataagctgattttgctctaaatgcaagaagtaaagctaagcctattgtagctccagaacctccaatccatataaaccattgaaaaaagggttcagcagcaatacctggaactgcttgacccgcagcatatgaagctgtattagcatctaataattgtatccataaaggtcttgccaatgaacctattattgatacaccatgtattccaaatgaccaaaaaaacgttattaaaaatattagtataattactgatggtaatgtgtcagtggctgaaactaatggagttactaatttagctatgaagccatgccaatcaaaccctaggaaataagtaacaatagccattaaaattattattaatgcggctggtgtcagagcttcaaaagaccttgtgactgatgctggaactgcttctggcatggttatcttgaatttagatttgtcagtaaatctataaatctcaacacctattatagatgttacaatagcaacaaacattgaacctccaccaagattagccattggcatttgccatccttgaggaattgaattataccaagctaaaagttctggactcttttcaactatctttaataaatcaggggtaagaccctctattgcagtaggaactattgtcaaaaggaatgtagctgtagctaataaacctcctgtcaatccatctaacttatatgactttgccaaactataacctatgccaaatgtagaatatactgatataataaaaaatgtcattctatatggtagtaatattgtaactgcattttcctttagatactgagttaccccccatgaatctggtaatggaggaaatgctaatatcaagaaaaatgacccaactattataagtggtaatgaagctacgattccatctcttacagctcttaagtgacgttgttctgccaatctggccatagaagttgataatttactgtctaaaaattctgtaaatttatctagcatcttttctctccttaattaatatttatttttattatcattaaaatttttataaaattaactttcttctaacctaacaacactgcaactactatttactcaacaactcttgaacttgttttaataactttggtcctcctaatggactataagcttgtgcttgtattaatgcacatggtacactagcctcatcagcaaaagcttttaaatagtcaaatctatgtctgacttgtggagctaccatagcaatatcccatccatttttaacttcattctcaaactcttgagtaccaacagccaaaacatctatatctattccattttttgctccttctttttgtaatgcattaactgctatagcacttgacatccctgatgaacaaacaaataatactctcatattgattccccctgtttttttatttcttttcaatcattatagcatgtatttttgattacaggaatacgtttgtatatattttttcatattttacatttttaattgtaattttatttcatgcatttatatcttgctttaattgctttatttatctaatcattcttttgtctaaaattacacactacttaaaatactcatatcttttcttaaaaaagaaaaaagactatcttttattaacataaaatagtctcaatacttttttaaatatgtattcctttatatatccagaagtaacctattattgcaaatgataaaacaaataaaatatacagtctaaaaaatcccaaagaaaaacctctcttagtttcaacaaagtatcttgtatatgcaactgcaaaagatgtaattaatgaatttcctataacaactccaaatctattatctattccaaatatagataataacaaaggaaaaactacagtacttactagagatgaaactattagtattaatccacttttaaaacttatagttggaatattataatctgttctttgatttttctccatttctttcttagtatttttattactttttgcatttttataattattatttttctttcttttcttttttttattattagacatgtcatttacctccaaaaggtttaggtgttatattccctaaaataactttatttttagcccctgttgcagatattacattagaaaaagaattatttaatgtttcattgcccaagattacaaatgccaaagcctcctttgcatcagaagaatacccatattcatcttgagttaatacttcaacctctaataataactcttttatatatcctattaaagttagattatgaactcctccacctccaattaataaagtatctacattaacctttggaagtatgaagtttttataattataatatatagcttttgccgtaaacatagttactgttgctatcaaatcatatttatctacatgtttatatttgttaagcatgttatccaaatagacttgtccaaatacctctcttccagtgcttttaggtggcgcttgactaagatacttatgactcatcaaatcttttaacatttcttcattaattttaccttttgatgcaaagtatccatttttatcatactttctattaaataatctttgacatactccatctattatcatatttcctggtcctgtatcaaatgcaaatacatcatctatgttacatgatttaggtattatagtaatatttcctattccaccaatattttgaagtgctaaatttttatttttatcactatataataaaaattcactatatggtactaatggagcaccttctccacctgctgctatatccattactctaaaattagatattacctttgtatttgtttcatatgctataattgctggttcacctatttgaagcgttgaagatacaaaattattataacttcttggtatatgaaagattgtttgaccatgagatgcgataaaatccaaatttgctatatgaaagtttgctttatgacacactgattttacagctttactaaataaatatccaagcttaaaatttaagctacagattaaatcaacactcgattcctcttctatacagcactttcttatttcgtcttttatatctttaggaatttctagagttataaattctatttgcttaactttagtatttctaccattcccactaatttcagctagtactgcatcaactccatctaaggaagttcctgacattaaacctacactatacatagttatcatccttttaagtttatagttattcctccccaaatcaaggtattaagtttaataattttagaattaatcttatttcatctttaattgcgataatttactcttacgaaattaatcgagttaatcttatacacgttttttaccttagctaaatcttacattaatttattttcagtgtcaatgtaatgcatgtaattttttttcacaaacaaaacatattctctctccaaaaaccatattaaaatagttactacaaataaaaaacataccaggtacctatctgatatgtttttcatatataataattattattttataatatagatagaacatcatttaaggcactaattaaatcttcactattttcaagaactaaatttattcttattgtatatgtcgatttgtatatgatgatagattttatagtctaataacctaactatctaggcttaaataatccgatatatcataaaagtagatattaaaaattgtatatgaaccaattttcgaacatacctcaatctcatgccctaaactatctatcattttctttacaaaatacatccccattccagtagacttatacaattgatttcttccatttttccccgtaaatcccttgtcaaaaaccctagatatatcttcctcatttatacctataccaaaatcttttatagataataccactccattttctaacttttttgaattaaattcaatcttaccaacttcctttgaatactttatagcattattaataatttggtctaaaacatatgacatgcatttagaatctgtgtaaacatcattttctaattcattcaaactaacttctacattattttttataagcaaaaatgaattattttttatagacatttttaccaatttttctaaattaaatttatttataaatacatcttcaaacatagtgttgcttctactactatacaaaatagagtttactaaaaaatttatctttgcaacctgattcttaatatccaaactatcttctatgctacttaacctatctgtaattatacttaaagaagatattggaatttttatttcatgaacccatttagctatgtaatcatctaattcttttaatgattgtttataagtctctatgtcactattattttttatttttaagttttctataatatcttttattagattttcttcaaaagattgtccatcaattaaataactgtctatttcaccactattttctatacaattatataaatttatataactatttctaaaatttatataatctataacaaaaaataccattattataaacagcactaaaaaatctaagtatattaattctgaatatctattttttaaaatatctatagcaaataaatagatatttattatactaactacaactaaaggtagagcaatatacttagacctaccttttaaatattttactagcattatattatatatcctatccccttcttagtttttataaaatcatcaaaacctagttctttaactttacttctcaatctattcatatttacagtaagtgcattgtctgtcacaaactcatcattatcccatagagtcatcataagactttcccttgatacaaccctattcttattttttaataataatgttaaaatttttatttcgtttttagtcaactctatacttttatccttatacttatgttttataatccctttccccacatcaaacatcaaatcttcacaatacaaaatactattagaatcactataattatagactcttcttattataccatttattttggtaaccaatatgtctatagaaaatggtttggtaatataatcatctgctccattatttatacccattattaaatccatatcagaatctcttgatgataaaaatattaatggtacatttgaaatagctcttattttttcgcaccagtaaaatccattatataatggtaaatttacatctaaaagtactacatctggttttttatccataaattcatctaatactacctcaaaatcatcaattaattctactttaaatccccatttttcaagtgctaacgcaatctcttttgataaatcaatatcgtcctctactaataaaattctatacatttgtatattctccattatcctaatatttcactatgccatgaattattaatatcataacatattttatataaatttattacccaaattatttagttaatcaacaaggagactcttattacaagaatctcctttctctttattaatatatcaactaatttttatacactacactcttaaacttattaacagatactgctccatatattacgaatattatcaaacatatcactaaacttagtatatatataccagataaatcgttcatcaataaatctcctgctaatctcaatgcaaaataactagatatagttgcacttaacattggcaaagtataaaatatagctacttctttaagtatagctctatttatatctttttctgtagtacctatttttaataaaatcttgtatttctctttatcttcatatgcatcactatatattttcatatatattatacttccagctacaattgcaaagactaagaataaaaacacaagcactacatatgcaaacttcatccattgactctcaccttgagctttatatccattctgaatatatccattttttaaacttaaattcttttcaatattgttgaacattacttggctattttcttcttgaaatacctttgcaccataaaaatatacttgttgacccttatctcttagtttaaaatatgtatcatcatttaccactataatactttgattaagtcctgtccctaatactggaacttttacttctccccttgaaatattatataactgaccatcaagttttgtcttgacttcttttgtagctattgatgctatcgtttgaggactttttagctctattacattatttccactaactaatctttcaccatactcttttaattctttatcattgccattcactttaagagtattacaaaaatcactatatttcattatagtatctgttgtatcataagcttcttttatatctgttttctttaagattgttagttctggatttacggagtactttatcttattagtatcttttattatgttctctatttgttttttattcacttcatctttatccattgaaactatgctaatagtgtacacatttctttgttcttgggcattcttatgtatatgcttcatagcaactgaagcaccaagagttgatattgttgtagttataattatagctattatagcataagttttatagtttttatttaatcggtagtttatattgtttatcgcaattatattatttccattaaataatatttttttatttttgattataatatcaaatataacaggcataactgatttgaataagccataagtacctactattattatacctataacaggtagtacactagttatatctccagttcttatattcgtagaaagatagtatccatatcctattactataagtgatactatagctaatatatatatacctattcctacctttggtattttttcttgttttttagatatattgattagatttattacactacttctacatattgttataaaaccttttacagccattattataaatatagaaataaagattaaagtagcatatagtatagcttctatgctaagtccattagatacctttatattaaatccagataattttattatcactacttgaaaaaatctagatgttattatccctataattattcctgttatacaagaacttattcctataagcatattttctacaaaatatatttttcctatagtatataaatctaatcccataaaggacaatattccaatttctttagacctattcttaaaaaatatatttgttgcataccatataaagaaaaataaaaatactgatagtatcattattacagctactaacactgatagtgtaaattttttattttcctcttgtaacacatttatagcatctccatatcttaataattcaaaattagtcagcacaactactgaaaaaaccatagatataaaaaatgctagataagttcttatgttactcttaaaattattataagcaattccaagtatactcacttacatctcacctcccatagaggctagcatatccataatttttccataaaattcttttctactatttcctttgtttaatttacactttatatttccatcatttatcatatatacttcatttgaataacttgccgttagagggtcatgtgtaatcattataatagtagcgttgttttctctgtttattttttctaatgattctaaaagttcatatgctgatttagagtccaaagcacctgttggttcatcagcaaatatgactgctggatttgtaattaatgacctagctgctgcgcctctttgtttttgtcctcctgataactgatatggatatttatctaaatgattttctaatccaaattttttagctatagaaaataccttagcttctatctccttgcttttcttttttcctaatgctagaggaagtgctatattgtccattagtttcatattgtctaatagattatagtcttgaaatataaaccctattttttctcttcttaattttgatagttcattattttttacttttgatatattaattccatctagtattatttctcctgaagtttgtttgtcaagtgtagacattaaatttagcaatgttgtctttcctgcaccagatggacccattattgctataaaatcaccttcattgactgtaagagatatattttttaacacatttgttttaaatccttttattccataatcttttgatatattttttatttttaatatttctttcataataatagcctccagttgctaattttttaatatatatttattttaaaggttttatataaataaatccttaagtaaatattacattttaactgttagcattacacttttgtaacatatggaagactattataattatagtggaaatatcttaaaataaaagcatgattcacttttttgtataaacaaagaaaagaagcccctaagaagcctctaatctatacaataattcttctctataaaaaaccaaaaatacaaccttgattgtggcaaatacaggtactataaacaagtgatattactactatatattaaaacaattattcttgaagataattcaataagactatcaagccataagctaagcatccaaaaagacttaatatcattaatgtataattatacccaatattaatactcaaaaaaccagcaacagttggaataatcagagatgaacctcccataaatatacttaaagctattaattggctactacttctaagttttttaggagaaacttcaaatattaatctttttgaagtaattaaaattaaaggagtagaaaacacttgaaaaacacacagtataataatgatatttgaatcatttgttaaagcaaataatagaaactgaactgttatcataatagcacttaattttaataagtttaaactgctatatttttttaataaataagaaccagccagatatgttggtatctctaataatgactgtaaagaccactttaaagatatctgagaatttgtagcatttaaagctatcattttatctattacagtacagttatttgctaccaccattgagtataataagaataaaatacatactagtaagatatattttttatcttttaataattcaataatatctttattagttacatttattttcttattaatcttttcaatatcaggtaataatagtatatttataataagtaatactacaattaaaccaatcgctacagataatccaaaatatgagaatctaagaatcaagtaagatgctaccatacttccaatagcccatccaatcgacccaaaagtcttaataaatgacaaataattattaatattatctccacaacctattatccatgtatcatataaactacagcaagtatttaataatcctcctgataaagcaacaagtaataagtatattataaaagttgcagattcagtagaaaacataataactgatgcaattccataaactgataaactaattaaaacaatttttttcattgtttgatacttatcagctaatactccaaataataattgaaataatatattggttattgcatagctcgataatataattcctctttcaaacgctgagtaacctaattttgataagaaaggtgtgaattttgttgaagcaaaggcaaaaataatatatgagaaaaaatagaatatgataaatttaaatttaatcgctttattaatcataatcaatcaaaattgataactttaataccactatttccttcctgatttaagtttgaaagatgatattttaccgtattaggattctctacaataactaaaggaatatataaagtattttcaagtaacttattatcaatttctactaacttttcccccatattaacttcttgaccttgtttaacttctaatttaaagttttctttttttgttgttgcactatccaatccaatatgaataagaatttgaacatcattttgcaatttaattcctatagcatggttagtttgagcaataaaacttattactcctttagtcggtgatttaagaatattgtcctttgctatcatagcaaatccatctcccattaccttagttgaaaatactttatcaggaatttctccaagattaattatttttccatcaatgtatgaattaattgtacttgcttctttttttcttttaaagaacattatagacactcctctacataattaactttattctaattatcattacaaataacgatattaagcatactgcaattgaggaaaaaagagccttatagctctttccccattgtagttctttaatactgcttatgatttgtttaattccaacaaatttataaatataggtaaacatgataacaatagttattgtgtaaatttggaatatctgccctaataagactaaatagaaagcaatcatgttttcttttatctctttattcttttttatattgtaaataacatatgcactgtatactgcactaaagttagagattaaatttaaacttgcattaacatcattgtttaaaagttgtgaaaatgaaatgtttgtaaataatgatgtcaattctaaatacactatatataaaacaggtaatattagaaaacaaaccataaccactgaaagaaatatattttcatcttttaatactgctgttatattttttattttatttgttatcatgtttttgttctccttatttaaaagttggccagaaatccttattagccacaatcatttcatctaagatttcttttgctacttttgcacttggaacagttttactcatagtaaacgactgccataatttttgataacttttttctatccatgcttctacagctaatttttcagaagcaacttgttgttccattaaacctttttggaaagttggaattttacctatagacataggttcaaccatatcttttccaacaaggcaaggaatttcaatcattgcatcatctgcaaaattttcaatagctccattattaggaacaatcagtaaaaatctttcctgagtattaaatgctaatgcacaagctaattcaacaataaattgagaatgttcacttgcatcaaaccatgtatcccttgctgtgccattttttataattctttcacattcttcgaatgtatccttttctcttctatccataatttcatttgctcttgtataatttggattagcatgttcaacagtttcatcagccattaaataatattttaaataagtattaggtaatgtagtcggttctatttctaataagtcctttgctgctctcatagtttctaaccaactagattctttgtgttgaccttgaggtgtaaattcctcatatccttttttagcacaatattcctgtaatttaggcattaaatcatttccttctttgtccttaatacttgtccaccacccgaaatgattcaatccataatatctaacatcaaagtctttacgagaatttaaacctaaaattctagcaaatatttcctctaaacatactggcatatcacaaatattaataattcttgaatttggtcttaatacacgacatgcttctgcaactatagctgctggatttgaataattaagcatccaagcatttggagaatatttttccatataatcaatcatttcgattattggacctattgttcttaatccataggcaattccacctgccccacaagtttcttgaccaacaaccccatattttaatggaattttttcatcttgttcacgtaaagcatataaaccaacacgaatttgtgccattacaaaatcaatatcagtaaatgcttcttctggatttgttgtataactaaatttaatttctggatttttctctctaacaattattgcacatgcttcagcaacttttctttgtctctcatcattattatcatataatttaattgattcaataggaaatttagcaacactttcaattaacattgttacaattccagcagtataagtactacccccaccagcaattagtatcctctgtctttttctttccatctttccttctcctttataataaattttcaaattcttctcttacacttggtactgaaagcccaataataatctgaatagcttttccattatgcactaaaccatgtgcacctactaccttaaaatcttcttctttagaaataattgagtcatccttcaaggttaatctcaacctcgtagcacagtttgtaacatctacaacattttctgctccaccaactaattttatgtattcagatgcttgttgagaggctttactcaatttatttcctttttcatctttagtttctaagtattcatttttagtatatagttttgtttcttcattatcttcctctctaccaggagttttcatatcaaacttcttaattaagaaagtaaataaaaagaaccagataaatgaaaatataatccctacaacaacttgaacaacatataccttccagtgatacattccaagaggaagccaatttaatacaacccagttaataattcctccaccaaaatcaccaacaactcctaaggcaaacgaaatcgtttgcaagcatgcatctaaaaatgcatgtactaggaataaaagtggtgctacaaataaaaatgtaaattctaacggctcagtaattccagttaatactgcagtaagagtagcaggaatcattaaacctaatacttttttctttttttctggctttgcagttacatagaaagcaccaaatacacctaatgaaccaaacaccttcgataatccagataatgaaaatccgattggatacatttcctttagagtcttagctgaagtttgaaagtcctgaatatgagtagcccaatatactgatgtaccacctggaacaacaacactatcataacaaattggtgcatatacaaaatgatgtaatccagttggtattaaaatcttttgtaagaatgcataacaccaaactcctatatttccactatttataaaaaacgtttgcaaatgtctaataacattttgaatatgaggccaaataaaacaagttaataatgcaactggtatcataacaaagaaacaaattgcaactacaagtgatgagcctctaaataatccaataaaatctggtagttctttatcataaaatctattatgaatataaatgacaatacctgatattaacaaagcaccaaccataccagtatctaatgttttaataccagcaatgcttacaagtccacttccagcacttatttcagctgcgaaatcaactccaaagctttttccccaaaaacttaacatagaacctacaaaataattaaaagtcaaatacgttgctaaagcctccatacaagctcttgcttgttgcttttttgcaagtgctattggtaaagaaatagcaaataataatggtaattgattaaataccatccaagctccactagatattacaccccaaaattggtaccaaatattttctggtgtagcaagtgaacccataattgactgattttgaaatacaattgagaatccaaccattatcccggcaaaagcaaataatagtgttggtgtaaacattgcccctccaaaacgctgtattttcttcatcatataaattactcccctcctcatatttttagtttatctttggccttagatatctattattttaacaggttaataaatatatacaatctttagggtacatttggagcttattcacagtcaaataagtttttgcacatttttatgttcaaattctcataaaaaaaagaatgactacaatttgcaatcaatcccttctgtaatcattctatgccttttataaatactatatttaataaataataactcaatcaatataaaatataacattgtcaatttataactagggtgcatttgtaaaaatgagatattagtcgctgaaatataaattgattcatcacttaaatcagtcaatgtattatttttaaactctgtaattgaaattattttagttcctattaattttaatcttctagcaatattaagtgtattctcattctcaccacttagggatataataatcataacatcatttttactgacaatattgtaaaaagaatcatcaaatgttcttccctcaaaatcatatattatttcttgacatgataagaacattctctttatctgttttgcaaccacattttgaatatcacctgaaccataagcgtatattgttcttgattcataaagaagtttacacaatgcatcataatctttatttttttgatcttcaacatacttaattattgaattacatgcaatatcaaatgactgattttctatgacatgaaccttttctgattcccagcttaataatactttaaactcactgaaaccttttaaatctaattttttaacaaatcttgtaatagttgcacgagacacattacatttcatagcaagttcatttattgacatcttactacaatgttttttatttgcagttatatatttccatattaataaatctgtatcattcaatttattataatttaaaaaaatcatttcttctaatctcataaactattatcccctttaattaaaaatcgtcataaatattataccaatattcaacattaaattacagcgtattcttatatttactatttagcccataaaattgactataaaaaatactgctataattgatgtttaaaaaaatgtagttttaattttattcttttatctaataattaatattttcaagttctagtgcttttcttatgcaattatcatctttaaaatcagcagtccttttacaatcttttactttaaattctggaatagttttaaattcctcatcacatattccattcttatttaaatacatacaacttgccattctaactattagaccactattttttaaattaaacaatacagggtctatacaccctccatctccgccagtagtttcaccaactaaagtcgcaaatttagtttctttacaaaacattgcaaatgactctgatgatgaatatatttttctatcaacaagtaagtatatattacccttaaattttgaatcatctgtagattttatagtataggaagtatcttcaaaatcattaaaatcttttataatttctttaggtgcattttcctttacacttgctggtaaattttctacaggatttaattttatatttcttgcatttgtatatttttttactatttcattattatttctataaattctataaccatttattttgacatcattttttatgagtttagatacgattccctgccaatacctatcacttccacctaaattacctcttatatcaataattaaagctttatgtttttctaaagtgttaatataatctccaattatttttaaatcattatttatagagccattctttgatgacattgatggtaaatacatatatccaatctgacccttaataacatcctttaaaattaattctttttttacaaaaatatcatctggcatttttattttaagattcatagagtcatatctatccacaacttttttatcattaagaaaatcataccaatcattattagagtatgatttcttaaaaagttcatatcttttcttattatctattacttctgtgtgtttattatttaaatcagataatatagatgacagttcttctataaattcttcatcattttcagtgttttttattcgttttgtatattcatccttatttgctaaccaatcaatattattaagtctcttatttacacctagatatggatatcctgtctttacaacattatacacataattaaagtcatccaccttttcctcttcagacaactgattcttttgagaataagtagaattacctaataagattataaatgctaaaataattactaaaaataatactttctttttcatgtaattctcatccactttcagattttatattttaatacattgtatcattattttattatcacctaaacagttaaaagaaattcttgaagatatattccactattattctatttaaaaatttttatttgtattttcaaaattatttcatgaaagttataaaataacaattatattcaaatatctattttactgctatatcctgaaagtaaattcttatcagtgatatactaaaaaagatatgctaaaaaatttatccattataatgacttaaatttagatactttactgatttttatttattagttgagaaaggtattgataattaaaaatattgataactatagaaatgattattttttatagaaattttaaggatataaactaattatacttaagtctatatccttaatttatcatgattatgagaatttttacaaatacttatctttgtccgttttagaataaaaacaagaacatatcctgttattttattcaaacatccaagtttaattactacacaattacttattagaaattgtatctacttcatatatatatctgttaagtatagcttctagcatttcttgtcttccagacttattctttataactggcatttgcagtgcataagattctaactctttaaatccaaccttaccttctactatatccttacctataccttcactaaaacttgcatatctttctttagtaaagttttcaaatacctcatcttctaataatttatgagctattaataatccctttgcaaatgtatccattcctgcaatataagctaggaataagtcttctacctcaaaagatgctcttcttactttagagtcaaagttaaatcctcctggtgctattccaccttgctttaacacttcatacatagcaagtgttgcatcatatatatttgttggaaattggtctgtatcccaacctaataataggtctccttgatttgcatctatactacctaaaacattgtttattcttgctatatttaattcatgttggaaagtatgtcctgcaagtgttgcatggtttgcttctatattcattttgaagtatttatccagattatactttcttaaaaatcctaaaacagtagcagtatcaaaatcgtattgatgtttagtaggctcttttggcttaggctctattaagaattggccagtgaatcctatttccttagcataatctacagccatttgtaagaatcttgcaaagttatccatttcaagttctgtattagtgttaagtaaagtttcataaccttctcttccaccccagaatacaaaattttctcctcctaagtacttagttatttccatagcttttttaacctgagctgctgcatatgcatatacatctgcattacatgttgtagatgcaccatgaacaaatcttggatttccaaacatattggcagttccccataataactttatacctgtcttttccatattaacttttatatactcaactatttcatctaatatcttatttgtctcttctaaatctcttccttctggagctatatctctgtcatgaaaacagaaatactcaattcccatcttagacataaattcaaatcctgcatcaactttaatctttgctatctcaattgggtctgttacattattccaaggtctctctactgtgcctactccaaatgggtcattaccctctccacataaagtatgccaatagctcattgcaaatcttaagtgttctttcatagtcttattacctaccacttgttcaggattgtagtatctaaatgctaattcattgtcagattttactccttcaaattttatctgtcctattcctttaaatatttcactcatttcatgtcctcctaatattttacacatataatatatgtcgtatgttttcttaatttaaaactattttctatctttatttttctttttaagctaatttaattatttatttttgtattaactacttcatctaataacttaaagtcatctttcaaagatttgtatattcttttatacaatctatgatatatcttgtatgtatctacattttcacttattggttctaatttagttgaagtttttattatagcatcacaagctttttgtatattttcatatattccagctcctactaatgcaagaattgcaactccaagtgctggtccttcacttgaatttatagtatatacatcttgattaaacatatctgcttgcatctgtctccatactttactttttccacctccacctgaggctcttacttcattaacgtctatattaagattctctattatatccatacagtctttaagactatatgaaacaccttccattattgaccttgcgatttcttttttagaatggattggagataatccaaagaacacacctcttgcataagggtcaagatgaggagttctttctcccatcatatatggtaagtaaagcaatccattacatcctgttggtacttgacttacttgattatttataatctcatatacatcttcacctaaagaatttgaaacttccacttcactttgacagaaattatctttaaaccattttaatgacaatccagctccttgagtaactcccataacatgccatgtatttggtattgcatgacagaaagtatgaactctaccttctttatcaatttttggctctttcgtataagcaaatactacacctgatgtacctatagtagatgaaactactccatctttaactattccatttcctatagctcctgctgcttggtctccagctcctcctaccactattgttccttctttaagccctgtcaaacttgctacatctctagtcacataacctgtaatctcttgtgattcataaactttacctaaaagatttttatctatatttaacttttctagtacttcatcgctccaatctctttttcttatatcgagcaactgcataccacttgcatctgatacctctgtagcatattcacctgtcaatttgtatcttatataatcttttggaagaagtattttattagtatttatatatatatctggttcattgtttctaacccataatatctttgatgctgtaaatcctgtaagcgctggattagcagttatttcaatcagtctttcttcacctactaaatcagttatctcctcacactcttttactgttcgttggtcacaccatattatagagtttctcaatgttttaccttcattgtccagcataactagaccatgcatctgccctgataatccaattccttttatacattcactgcttatatttgaactttgaactacttctcttatagattcgactacagctttccaccaatcatttgcatcctgctctgcccaacctgatttctcttgtataagaggatattcatatgtacaactttttataatatttcctagtttatcaaataaaactgttttagtacctgatgtaccaatatccacacctaatacatactccaacttcatccctccttgaatgccacttcataactatcgttttcctatcctaatttttttatattttaggtatattttacttgctttatttttgttagtatattaaactaacttatgaactaataataaaatatttaattatctttgtcaatgcaaaataaccttttatttttgtgtaaaaagtattacaatattattttaaggaggaatatcaaattggttactgataaatacactattcgagaaatgaatgaaagattggtacttgaacaaattataaaaaatggtcctatttctagggcaagtatagcttctactataggattgaataaagcaactatatccgctattaccaaaaaacttattgatgaatctctagttcatgaaataggaattggaaatagtactcatagtggcggaagaaaacccatattattagtatttaataaatgtgcagggatttctttaagtatggacattggatacgactatatattttcttctctatcttacttagatggaactattataaattctaagaaattaacagatatacaagtaagtaaagacaatgttatacaattgatagatgaaattataaatagttataacatatccaaaatagacactccttataaggtaattggtcttactttggctatacatgggattacttgtgaaaataaagtattgtttactccatattataatcttaatgagattgacttatatagcatccttagcaaaaagtatgactttcctattcatatagaaaatgaagcaaacttaacagctttagctgagaatactttttcaactgtacataactcactacttagtctcagtattcacagtggatttggttcaggcattataataaataataaattatatagcggcagaaatggtatgagtggagaaattggtcacactatcatcatgcctaatggtaaactatgtccttgtggaaatcgtggctgtttagaacagtattgttcagaaaaaaaggtatttgaacagctttcttctttagaaaatattcctaaaatagattctgatatagtaaagcaactatattatgaagataaccagaatgccaaaaaagttattcatgagttttgtagttacttaacaatagctataaataatgctattacaacttatgctcctgaaataatatatttaaatagccaaataattagtgatatccctgagatattacagattacaaaagatatgttagttagctcttttaacaaaggaataaatatagaaatttcatcattagggtctgaggcatctctatatggtggctctgccgtaaatatcaagagctttttgaatatacaaaatttaactttaattaatgaaatataagggttatgactatatacagccataaccctttaaattatacattctaaaattagatttattatatagtttatgcaagattagctatattttttaaaaattgtatatcaattaagtattaacacaagtattttgttttaaatattaatataatcttcctactcatcatcagataataaacttgcattttgttcaaccatagaaatattatctttacctattttctctaattttgctgccaattcctttgtatctaaaaaagctgattcaataaccatacctaaatttagccctgaaataattttaattcgactgtcatcattggctactaataaagcagcattgcatggagttccacctagtaaatctgccattataattatttctgaactttccttgtacacttctaaagctttttttaatttttctattgttccttctattccatcatcttgtttcatatttacagtaggataatctatagaatcccctattatcatttttgcagaatttaagacttcttcagccatattgccatgactcatcaaaataatactattcactttaatacacctctttaaatctataagatgtctacaagataagttttcttatcatcaggcgtcattatagttgtaatttcaattccttcatctaaaagtcttttaaatgcttctttctcttcttcagtaacactgatattaggtcttagaactgttgtatcttttctacttgacatatttcctacatttatattatgtattttaaatcctgcctctacaaatggaataaggtccacaggagacttaacaattaataatacattttgtccttcatactttcctgcagtaatattttttatagcagtctcttctgtaattatagatgacgctatacctgcaggtgtagccattcttaaaacttgtttttgaacagaattgttagctactgcatcatttactaccattaatcttgtaacacccaatttattactccacatagttgcaacttgaccatggattaaacggtcatctatacgaatatttttaatacctttcatttccatatctaatatcatcctttccttattttaaaatacctaatgcatataaaattattgaaacaaccattactcctaaaattaagtatataggttttatattctttttaagagcccaataaacaatcacaactaaaattgcaggaactaacccaggcataatttggtctaatatttcttgacctttcattgtaaaatcaccttgttgaaagttcaaagcaacattagcttttacaactgaaggtattaatgcacctacaaccattaaacctaaaatagatgtactctcagttaaaatctttaaacttttttcaattgaagatattagcttagtacctgatgtatagccagcattaaatagtggtatacttaataatttcaatgctacactcactacaatccacagtaagattccaaatggacttccatctatcgccatattagctgctatagctccaaaaattgtccacggaataacgacaaataaactatctcctaaacctgctactggtcccatcaagcctgttttaattgaagcaacagcctcttcagtctcttcacttgataactcctccattgctacattaatacccaaaatataaggggcaacccaaggattagtgttaaaaaattgtaaatgatttaatacagcactttgtaacttttctggattatctttgtatactacttttaaaaaaggtagtactgcataacagtatgccaaggcctgcatcttctcataatttgaagaaacagaactagtaaaaaaccagcgccataagacactttttttcaccttttcatttgatttatttaatgataccttatcactcatcttcgtccatacctcctactacagtatattgttgttcttgattttccaaattctttttgtaaattataagtgcaattgctccaccaattaaagctacacctaataatggtactttcatatatactgctaaaacaaaaccaattactaagtaactaaaatactccttagcaggaagatatctaagtaataatcctatccctactgctggaagtagtcctccagctactgttaaaccacctgttaaccattcaggtgtatatttcaaaatggtattaattaaagaaggtccaaatattacagatagagcaactggaatacctgttgtagctgctgttaatagtactcctaacatttgcatataggttatatttttataatttccttttttagctccatcttctgctttatgaactagccatataccaatagtatttctaagaacatctaattgtaccatcaataaagcaactggaatacctatagagattcctacagatgcttcttgcttagtcgtaatagttataaatgtggctactatacttgctgtttgataatcaggtattgatgctccaccaaagttactaatacctaatgataatagctgtaatgtacctccaatatataaccctgtatttatatctcctaagataagaccagtaataaaacctgctgttactggttgatatgttccaaacattgttgaatttttttcatagtttataaaaaatccatatagtacgattaataataattgccataattgtggctccattatgatttcacctctcccaaaatattttttagttctttaaaattataactggaatcttgctttaggaaaataggaatttcttccagcgggcattcaacttcataagttttcccaccttcataactaactccactaaatatattttcccatgtatgtccttttggtaaatatacttttctacttctatctttataattcattattggagctaccaaaatttcatctccaagcatatatgtattatccacctcccaagttttatcatcttcaggaaattcataaaataaagttctcataactggtgttccatcttcatgcgcttctttcatcagtttttttaaataagtttttaagctctctctaatttttatgaattttgtaagaattacttcaacttcttcaccataagaccatatttcattaggagctccagttaccattgagcctccacctttatttgataatggtttactatgaggcaatctatctccatgcattctcaaaattggtgaaaaagtagcatattggaaccatcttaccataagttctctaaattctgggtctttaggatttcctccatggaaacctccaatatcagtagtccaccatggtatacctgccagtcccatatttaaccctgtatttacttgattattaaaagcctcaaaactagaatcaatgtcaccagaccatactaaagctccatacttttgagctcctgcccaagctcctcttacaagagttacaacagactctatgtcattatgtaaaccatcataaatcatttttaaataatcaataggataaatattaccacaacttaaaacatttccttttttatatctatagttatcaaaatcatacacagaatagccaggttcagctacatctaaccaataatagtcaatcccaagttgtttataatttttatctattctatcccaaacatattctcttgcattttcatttgtcatatctacaaagactgtatttccttgaatttgcattgtcattctaacaccacgattaacattgactaaatagccattttctaaataatcattgtagttttctgcatcactttgaactgtaggccatacagatactattggttctactgaatactcttctttcaattttttaactaattctttaggatttttccaataatctaagtcaaatttatattcaccttgcttaggccaatgaaaatagtcaattgcaattgatgaaagcttaattcctcttttagaatattccttcacaacatctaaaacttcttctgaagttctatatcttagtttactttgccatagtcctaaaaggttttcaggcatcataggaacagttccagtaacttgagaataatttttatttaactcttttgggctttctccacaagtaatccaataatctataaaatttgtagaaaacatcttccattctgtcatatttttagcaaaagatacttttccaattcccggattattccataaaagtccataacctagactagaaatataaaaaggaactgatatttgagaatttctttgggctaactccaaaacagtattctttaaatctaaaaatttatgttgatattgtcccattccaaaaatcttttcagaaggctcagattcaaatctagtagttacttcaaattctccactatagcttggtcgatattctcttgattttaactttagagtagagttaaagtctttggtaatctcaattgtccctacatcttctccaccatcatcatgttttacagctcttaatcgaatatattctttcaataatatttcatttttatcattataaaaagtaattctatctctatggtctaagacagcttttatctttccatttttaatgattgcacttccatcttcatttttattaattgtaatatcatctttatttaacttaggtttttcgttaagagcatagttttcatcaacaaaattttggtctacaaacgacctaatacgtaaagagttttttccccatgcttctattcgcaatagttcattgtcaaatcttttttcaatatagtcttcagatatttttatcacggctacctcctaaatcaatggtataatattctatctttgtgtagcttaagttaaataatgtcgtttagtatcgttatttataaattaggttttatatataattcatttgtacattaaactaacttaccaataatatactttatttgactttgtttgtcaatcgctttccggattttagtaaaattttctaatatgttgcttgaaagtcgttcttaatatcttttatttatacttttaatatctgtgatgatacctatatacatctagttttttttaaacacatacaggaataaaatttgcctattatgtagataatattggacttgaaaatatgtatagtgaccttataaatacagataataatatattagatattgttcaaaacaatggattttataattataaataatttatgaaattatttaagaaaatatataattgtataccaagtcaaaaacgacaacaaataaataaaactaaaaaagatgttgtctcaaaatatagataaatttatttttcattgctaaaatgattaaaatatatttgatttaatatacttgatttaatataaaaaaagagtgtctcataaactaaaaagttcacttttagacactcctttatatatattatcaattcatttattacctctctacattttctttcagctagtagatacatctttataagtactaattactccacttaaaaatgattcaggtactgtccatcagtcatatttttctgccaaatataatggtgtttcataatgagacaataaatatttatatctttacttatcttctctaagctcgtcaaatccaactataggtatctctaaattatattctttaagtagcttttctagctcttctataaaaatacctttcccatccaccatttgtatatcatttattttatccatcaattcattgcaaccacttagctcaccaaaccaacgtttagaactacatgtcttattataaccacaacttggactaccatctattgcaatgatactttttatatcataatcattttttaaatattcattaaactgccttacatgaggtattaacatttgcctacattgttctctaaaaaacaaattgtcaaactgttcttttacatgtccccacctatttattccatacataatcatttctgggcatggtagttgaattattccataccctttatttattaaatttatcgctatattttgtgctcccttaaattctgacaatccctctactttagaattacaatttaatatacaatgacatactactacaatctctctatttctcttcataataatctccttagttattcttaattttaatgatactacatattttgataattatattatttatttgttctatatttccaatattctatatagaaatatacaattagtaatcttttataatctatactatgataaatgtatatatttttttaggaggtattataattggatactaaaaaagtcacattttcttcaatatgcatagttattaatattgtcttaggtatggttatatctatgataaatataccattattatttttagatacagttggtactgtacttggggctgtcgtattaggtcctttttggggtgctcttattggtgggtgtacaaacttagttttaggtgttatatcaggtcctacaaatataccttttgctcttgtaaatattgttcttggtcttattgttggatatatttctaagaaaaaaggttttggttataaagaagctattattacaggagtaattttatctattgtttgtcctttaattggtactcctatttcagttttattgtttggtggtttaagtggaagtggtgctgatttattggttggttttttagttcagtctggtcagaagatatttactgctgcgttctttccaaggattcttagtaatatagtagacaaacctttgtcttgtattatggtggtatattttataagtaaaatgcctaaaggttttataaaacaatatagtaaaaatacttctagttcatattaataaatcatttattatgtaagatttattactctttaaaatgctatatactcatttttatataacatttttattaataatttaattagatagtatttgtattattttaattaaacgtaacctcttgatataaatttgagctataaatctatatcaagaggtgctattttatttttaatataattaatattctattacgcaaaaaatgcatatatttcattattttatggaaaatattacttcatttaactctatatcaaactcattaagtaaaaatctaattatatttaatttagcctctgtatttaaatttgtttctaaatatatattttctgatattttaataccttttcttaatttatatacatctctagacttaatattatctataaaatctcttttataagtcttgtctacaatactgttaaaccttacagaatccaaatcatataaagtaagagcaacttgttcataaaattctgtccaatttttagccttatatgactctcctaatatactaaatgatactatactttcatttgtaaaattaacatcatcatcctctaacgtaaatatattttcactgttacttggaggttcatatgtaacacttggatatttccaaatttctacagctctatctagtaatatcttagttctattttttatttcttcttcattccatttatctatagatgaaatatatttatttagataaagcctactatctttaaatccatcttccatttctttcttttcttcaaatgttttattacttagttttgaattatatcctgtcaaagttaaatttccaattgtatgtaaatatttatcatgtatctccttatagttatctcctagtgattccttccatttatttgttaatgtctgtggcattatatgctctatatttagcatattattattgattaaattttctaaatcaacaatttctttattattataattctctaacctctcaagtatatataacttattctttgacttagtattatatatatctttagtttcaaaagcatttgaaaattcactgtcagtaggaaatctttgagatgatttcttatttataaaaatatatcttaatatattagaatagttttctttataatcactaaattttttaatttcccttcctaagttcataaatactttattcagtgcattcggaggtacatcacatactattcttcttaatataaaacattctactaaattaagggattctacaagtacttttttatttattataccttcattataatcattaaataattctaatataaacggatatgatacaaatatttcaagtttgtttatccttttcaaaactttgtttacatcattatcatcagtacatgaataagatatctctctataatagttagaaaatttaagtaaatcttttaataaaatttctatatctataccattatctgatacataccttttaaaactaaaatatactttatttttattcggtatacttctctcctttatagtcaaatagtctcttataaagctacttacgttgctacttgtatttttttcaattttataccaataattattataaaattcctcttgtaacttagagcttctacccattaacacaaagtttcttactctatcagcttcacttaaatctaagccagttgaatttagactttcaaagattaattgagggtcatcttcaccattttttaactctatttctactatagttaatttctgtatagcatcaaacaaatcatctattgatatattatcttcttttattctattataaaaatataaataatttgaaactatattagaatttctatctgtattcatttcttcttcaaatagttcatagtaagcttttctatcttctgctattggttttaactttatttttccatctttatctcttgagtgcttgtttataagataacactccttaatctgttcttctgttgtaataattccttttgattctccaaactcttttattatttgacacatggcaatcaataatattgacacagtagtcactctttgttgtccatctattattaaatattcttttcccatactatatatagatacaactgaccctaagaaatgagttctaaatccagaatctattatatcctctaaatcatcaaacaatcttttacattgttctttcttccagttataatttctttgatatacaggcactacaaaacttttgtttgacccctctaaataactaagaaattcaatttctcctgctttcatattaactccccctataagttaaataaattccattcataactccatgtatctatatattatatcaaaattttgactcataaatgtatatgaaagccttattatatacctttttatacctatttttattttattaaagtaaatacatgattattctataaaatatacaaatacttaattttaaaaattattatttaatcttcttcatgagtaattcatagttatttatcaattaaaaagagatattgcataattattcaatacctctctttgtatatttacattatccatatctagttatctatttcaacccaatattagactacctactaataaatttattctctacataattaacaataattttgcactaaataacatcattagcctatctctgatgcattttctttaattttatttatagttttaatcaatttatttctctcttcaatatgattttcaaataaatcaattatacttccaacagttctaaatgggtcttccatcaacactttgttatcctctataaatccattcttgactacataatcgactataagtttaacaaaatgtatttgcttagtattaaaactcttattatttaaaaactctgaaaaagcttcatttgcagcttctctatccaatcccactagttttctcactaattgacttactggagtatctccaaactcctttttataatcatcacaattacctaactgctttaagagtatttcctccaacgtttcaacatcttgctttgttatctttttattatttcttaatttaaatattgctaattcatctttatggctatttaaataatactctaccttctttttataattcttaagattgtttgcattatatacagaatcatttctatcttctgctacaatcatatcttcaaaacttgtataatatatcttttgactagacttttcaagatacttaataagctctcttaatgatatacgtacttcttctacctcaaatatatctgaatcttcccaaaaatcctctgtcattgctttttcaatagtatatttttgttgctggatctgtggtatagtcccaagtttcgaaagtttttctgctgtaaccattacatgccttatccctttacttgcattattattttgtaagtatgcaagttgtatattatacataactacatcaaatcttttagccaattcatcatcactatatgaagttatgagtggtgatatatattctcttatctcattttgtgctactgctccaatattgctccaaacattttcatttttatacttatgtacataacttaaattcatcctaactatataactatcctcatttaaagcttttacagaagttataagttcttctaacaattcttttctaagttctgcatacttaccttctatatatttaatatcttgaagttctttaaccatacttacctttatattaaataatttttcagtaagtgtttctgctttatttccctcaaatcctttaggattaaatttaaaaaattcaaaattattacaaaaatcaaatattaagaatctttccttatccatatcaacacctaataaatctggacataatctagttcctctacctatcatttgccaaaacttagtcttacttctcactttcttgaaaaaaacaagatttaggatttcaggtatgtcaattcctgtatcaagcatgtctactgaaactgctatttgaggtaatttattcttatcagaaaaatcatctattatagaatctacataatttatactatagtcaactgcttttacaaagttcccaccatactttggatacagtttattaaatctttcaactattgccctagcatgctttgtattctttgcaaaaattatagtcttaccaatcttttcttctccttctattttcaacccctctgtcattagcttatttaaaactaaatctattgtgtcagaattaaatagccactcatttactgcattattccctatttcgtctccaatactctcatcatcattaaatgtattttcatattcttccttctcttcatcagaaagctcatcatacttaattccatcttccataatcttagtcttaaactcaatactagtataatctactaaatatccatcctcgactgctttattatactcataagcatatgtaggtactccattttccatgtcaaaaactgaataagtatttttatctatctcatcctttggtgtagcagtaagacccattaagtaagaatcaaaataatcaaagattgacttatactttttataaatacttctatgcgattcatctattataattaaatcaaaatgaccaggtgtaaacaatctctttccatccttagacttcgtatcatcaattgcattcatcattgttggatatgtagaaaatatcatcctagcatcttctgggctgtctttgctatccaataaattacataacgccaagttaggtaatagcttagtaaaactttttttagcttgctttaccaatgcttttctatctgctagaaataatatatttttaatccaattatgtcttgaaagtacatcaactatagatatagcaattcttgtttttcctgtaccagtagcacataccaaaagagttttgcgttgcttattttcaagagcctcacatacagccctaatagcttctttttgataatatctattggatatttcatcatttattgttacagaacttaaagacttcttactctttcttctatctatcataagttgtaattctgattttttataaaatccataaacttttctatctgaatagtcatcccaaatatacatatcaaaaccattcgtcaaaaatattactggtctttgactatatctcttttccaaacaatctgcatataatttagcttgttgttgaccaattttcgggtctttgctcgttcttttcgcctcaactactgctaatggcttaccattttcaccataaagaacataatctacatatcctacaccactttcattaggcataccttgtacttctatttcctcccctatatcttttccaaattcccaacctgcaagctttaattctatatttatatatctttttcttgtctcaaattcgtttacttcgtctatcttgaaatcgtagtttacagtattaacttttctcttttcagttagtgactttcttaatttctcattttcttttattacttcttcaagctttttatcttttgaacttaatctctcataaagatttttaagctcgtctggtctcgtccttttctcttccccatgaagtaataaatcttcattaaagtcttctgctgtatattcatctgaataacaatagtctatccaactaacaaattgatgcaaattgttaagtgaaagtattgcttctcctctctctatgttcgcactagtatgtacagataaattacctaatttaactatatattttaataaaggtaacatatcatagtctataagttctataaaactattattatgaatcaacgtactaagattatcttgataaggcaatactaaatcactatcattagcatatagccattttactgcaagctctaaagctcttcttgttatagttgcacaagtagatgggctaactagtatacttttttctgcttctaagcaagcagtattaaaactattgaaatttttcttcttttgtaaaaagtcaaaattacccaaggcttttctcccccttttgtcccttagttaaaataaatctctctaaaaactatttcttacagctgtttcttatactaacaaatacttcttcattttctgtaaacaattcgtacatatcttcaaactgtggtatatcatatccatgagaatcatcatttctcaattttctaagtgtttctataactatagaagaatttttaggtaataaattgtgatactcacaagctaaaaggtagtcataaaagtttttagattttatgtttaaatcaattgatttataatacaacattgcttttgttaattctaaaaatgagaccatatagcttttaaaaccttcttttatgtatctagcccataactcaggcatttcttccttatcatataagattttgaagttttgcaggtcatataagcaagaaccaaaatccctatttacttcttctattgagttccaagataatttgtttctaattaccatacatgtccctccaatctaagatatctattacatcactgttttcaaaatagaatttatttatataatccttaaaatctttagattcataaataacttcaccttctaaaatagcttttttaagtgctattgtataattatctgtaacaatttttaggtctacatcaatgtctaatatatttcttagagcttctgtcttagttgcaagttctgtaattggtacttttttgataggaatccaagctatgtctatatcgctttctgatgtatgtttatctgttccataactaccaaatattatgattgctagagtattttcttttggaaatacatttattattgagtttttaatctcatttggtatatttctcatttaatcacctcttgtttattaggtaatattgcttaattgaatttatatccataatcttttaatctatttatacatatttctctttcttcatcagtaaacaactctttatacttttcttttaatactaatacttctaatgataaatctaatctcttacactcccatagccttgtaaatccttcagtagctccttctttattgattaattctttagcagctaataaggctcctttgttatttatcagttgtaaaaatcttgttggcttatagttacattgtaaatcagcttctttatagatatttaccatgtcatgatataaatctagctctatttgattcatagattttattcccccattttaatacttgtatttcagttgaacaattctcctttaaaagctttttgcattaatgagttaaagttatcttctagttcttttaagctagtttccatttcaaacttcaaagagtttacttgtttaacgaagttggcaaattgattttgaagtctaataggaggtacaataatatttatttttctaacagcatctttagttatcgtttttgttacagctcctcttactttctcttttattttactttccatataggatgttagtaaaaggttatataagaatatatgattcactttatcttcattaaatctaagcataaattgattcatagctaaagatactggtttatttaaaaatggcattaaataaactttacctgcactacctatcttatttattataacctcaccaccaaacacctttgatttttcaagataattatatgcatgttcatcgatatacttaacacctttttcaaagttattattttctaaatctgtagttcttaccattaaggcataaccttttgtatctaaaagagttacattatctcttaaggtttcataactaccatttgaatgataatcagttaaaacatctaaatatttccctatttctgaaatttcccagtttttttcgttctttgatggggtaccaaacatctcaataaatcttgatttaactaattcatccaatacttctatttgctcttttcttttatctattaactcttgagccttgtctaaaacacgcactaccttttcttgcacttttaaattatacatgcgtatttttatattagctaatccttcattatttaaagctgattgtgtagcacctttacttaacctatttttttgatttagaaaataactactatttaagtaatggtataaatattgaggcaatatttcttttgatggttttaaaacataaaagccagtcgatactattatatttttattagttttattaataactagtgttttctttgtgtccttcatttttgcaaatataacttctcctatatttacagtttgatttgctctagaaggtttattttcataagtaactatttctagattgcttatcttgttaaaatctaagtttccagtactaagatatgagcgttctccatcaaacttttttacattttccctgcttatactaacaacatctaaaatttttgcttcatcaaccatactctacacctctaacattctttctagttcctctaatccatccactatctctttctctaacaccttaaccctacctataataacactaggagcatcataaactacttcctcatacactacctctttatacttattaatagataaatcatacccattctctcttatctcttccacatcaacaaaaaagctttgctctgttctttttctatctacttccccatcaagattatcaaatctcttaataatatcctctatatcactatcctttatctcatttctcttatcatccaaagaataaccatcagctttcatatcatagaaccataccttatcagttccacctgtccctgttttagtaaatatcattatagctgtagatacccctgcatatggcttaaatacaccacttggcattgatattatagcttccaatttatgattatcaactatttcttttcttatcgatttatgtccacctgttgaaccaaacaatactccatctggcactatacatgcgcatcttccaccaatttttaaaactcttaaaaaaagtgccaagaataataactctgttttctttgtcttagtcacttttaataaatctgctgacactgcttcataatctaaacttcccttaaaaggaggatttgctagcaccaatgtaaacttatctttatctgtattaacctccgataaagaatccttatactctatattaggattgtcaacgccatgcaacatcatattcatagcacctattctaagcatagttctatccatatcaaatccatagaacataccattattaaaatgctccttcagcccttgcactaagaaaagacttgaatgattatcccttaagtactgttgtgatgatactaaaaaacctgccgaacctgctgccgggtctactataatatcttctggtgttggtttaataagtcttactatcatatctattatgtgtcttggagtcctaaattgaccattagtacctgctgtagccactttggataataaatactcatacaaatctccctttgtatctctatccttacttaattctaaattactaataccatcaactattttagataacataagaggcgtaggaattttaaatattgcatctcccatgtactttgcataagctgattctttatttccatgtaatttttttatgaaaggaaacacttcattttgtactatttcatacattttttctgagtttccttcattagaaaacttactccatcttaaatgttgatgttcatcatcaaatatcttttcaaaagaaacacccaaaagagttgcttctgcttcattttttgtttctacttcatccaatcctttaataaataaaagatatgtaaattgttctataacttctaatggattagttaatccaccagtccaaaatgtctcccaaatcttgtctactttactccttaattctcctgtaatcatatatgactttccctccagtgttcataaaataatttaaatatatattttagtcgtacgccttaatagttagtgtcttatgttaaatccaagtttttactacacaattattaaattatttttcccatttacatattttagctaaaaaactaatgcaatactcttattttatgattattatatataccatacaaaattattttatcatatatccatcatagaagtcatctacctggataactcttaccatattataactttttaatattaatttaaacttagaaagaaattttttatttaattatatcatcttccttatttcaaatttctcaactacaatcctaatcaaaaaataaaataagatgctgtctcaaaatagatataatcttcttttttattgtcagaatgatgaaaatatatttgatttcacacaaaaaagagtgcctcatgaactaaaaagttcattttgagacaccccttaatttaatcttacttattctttccctttattattaacacttcactgtccctattgcttttcctacacatccacaaacttccatcctactcttaacaaaatctttaactgactctaaaccttttttaccatatttcttagggtcaattacctctgggtcagaattaagcacatccttaaccccattgctataagcaatccttaattcagttgcataattaactttgcaaatacctctttttatagattccttaataacctcatctggtattccagacccaccatgtaatactaatggaactgatacaacctctctaatttcagataatctatctaaatcaagctttggctctcccttatatagtccatgtgccgtacctattgctactgccaaagatgatacccctgttctctctacaaactcttttgcttctaatgggtctgtatatgctccaccatcaccaccatctaaatcgtcttccttacctccaactttgcctaattcagcctcaacaggtatatctgaaggcatacatgcatctacaacagatttagatattgaaatattatcttcgtaactttcatgagaaccatcaatcataatagaagtatatccaactctaagtgcctgcatagctagtccaaagcttgaaccatggtctaagtgcattgccactggaacacttgccttctctgatgctacctttacattcgctaaataataatctagccctgcatactttattgttgaaggtgttgtttgcaatattactggtgatttaagttcttcagcagcctctattactgccataaccatctccatattttcaacattaaatgcacctactgcataatgcccttcttgtgcatctaataatatttgtttagttgtcactaatgccataatttctcctcctatatgtttatactgatttgatttcttcgttatttaattttgatactatttctctacttgttttgctatttaataactcatttaaaaattcttcattcattaattttgaagatagttgagataatgtttttaagtgtaaattatcaccattatctgtagctgatatcataaatataatatgtgccaagcttccatcttctgattcaaagtcaaacccttcttttgatacacctactgctacacgtggtacctttactgcatctgtttttgcatgtggtatcgctatccccataccaaaacctgtagatgatatttcttctcttttaaggatttcttctttaaacttctttttatctaaaagaacaccagatttatcaagtattccaatcatttcatcaattacatctgttttattttttcccttaacatctaaaattactgtttcttcgctatataaagagatattattagatacgttttccgattctgcactttcatttttatgtccatcttttgttgcatttgtattttctatagtatttttctcatttactactttaggtgtaaccatcatataaagtacagcacctactaatgaacctacaaatatacaccctacccataaaagtggcttattgactaatcctagaaccaaaaaccctccatgtggagctggtacttctattttcattatataagttaaaattgatgatattgatgatgcaatcataagtactggcaacacttttaatggattttttgctgcaaaaggtattgccccctctgttatatgagtactacctagtatataattgattaatcctgctgctctatcttcttctgtaaatctatttttaaataaagtagatgctattgctattaccaatggtggtgttatacaagctgcagatacacctgccataaataaataatttccctgtcctagaagcatagttccagttacatatgctgctttatttactggacctcccatatcaaatgctgacatacatcctattactattcccaaaattataggacttgaattttgtaaccccgatagaaagttcatcatagcattgttaagtgctgaacatggtccaccaagtaacaacattgctacacccacaagacctacgctgacaataggaattataaaaatcgatttaagaccttctaattgtcgtggtaattttcttaacaaatgtacaaatagtttaactaagtaacctgctaaaaatcctgatatgattccacctaaaaaccccgaacctgtatcaaatgatatcattcctccaacaagtcctgccaacataccagctcttcccgatatagattgagctataaatgctgccaatacaggaaccatcaagttcatagaatatccaccaacagattttaatgtagctgctatttgattatattgttctgaatttgggtcaaatgaataaatcccccataaaaatgatatagcagtaagtactccacctgctactactaaaggtaacatgtgagatacaccattcattaagtctttatacaacttttgaccaaacgataaatttccttcttctgcaattttactgcttgataagtttccttttctaatagctacttttccatcaatacacctttgtataagttcattagccttatgtataccttctttgacaggtacttctattaccggctttccattgaatctgtccatatcaacatttttatcacaagcaactattattgcatctgccatttcgatatcttttgctgttaacttattttctacacctatagctccattcgtctcaacttttatgtcacaccctaattcccttgctgaattttttaatgcttcttctgccataaaagtatgagctattccagttggacaacctgttacccctagaatcattttctttcccatctttataccacctttctgactcttatattttttatataatcttccacattctccaaattacctataccattactttcagccacacttgctcctgttgctgctgacctttttaatgcttcttcaatatgttctggattttccaaccatatacttaaaaaagcagctaatgcagaatcaccagcacatgcagagctgactactgtaactggttgagcactagcataataaattgattttccattataaaaataagaacctttttctcctaaagttagcaatatattttgagcaccttttaaatgcagtaatttaagtacatccttaatatcttcttcatctcttacaataattccaaatatatctttgatttcttcatcatttggttttatcaaatatggattatactgtagtaactcctttaattttggtgaacttatatcgagtattgtctttatacttttatttttacaaattttaaatatatcctcatagtaattatcatcaataccaggaggtagacttccacttattgataagtaacttatatctgctaatgactgtatcttatctagcatatctagtttttgtttttcgtttacatatgacccagagtttacaaatttaaattcatcacttccatcatttaaaaatatatttatacgagttgtatcttctacccaagtaggtaatacgtcaaatcctctcttttcgctttcttcaactatatattttcctgaaaatcctccaaaaaatcctaatatcttagattctataccataatgacctagtacaaaagttacatttaatccctttccattaggagaatatacagcatttgatgtacgatttactaattttctctttatcccattagtagatatattcatatctattgcaggattcgtagttaatgtatatatcattgtcttcccccttgcttgtgctgtgtatgttttcattataataaaaaagtctatgaaaatcttttcacaaatagaaaatcgattttcatagacttttcaatttaattttcagaattattatatctgaccatataatctataattatcctagatataatatacaagggcaatctggaagatacttcatattcagaaattgatatatgttcatgtttgtatcctacaatatataaatccgaatactttataagttttgcactttcactacaacagcaagttataaccttagctccaactaaattggcattctgtgctgattctacaagctctatggtatttccattcaatgaaaatatgattataagttcgtctttttttattgatttagattttattttcattatgttggggtcatttataaaaacaacattaaaatcaagtaattgcaatttaagactaaactcttttgctacatattcagtaagccctcttgccaaaatatatatcttactagatttatttatagtttttattatattgattagtgtagttaaagatatttgttctataactctctgtgcttctataaaggatttatttattatatcccccatattttgtatatcatcattttcatcttttactgttaatctatacctaagttcattgaatccatttaaaccacattttctaattgctcttgaaacggttgctggagatgaatatgtttcatgagcaatctctactatagataattctggtaatattgattcattttcatttataaatttaattatttcaagttccgtcttcgttagattttcagaattacttttgtttagctcaattatcatatgttatctccccttatataagttttatttgtctaaatttatcgagtaatataatatattacctcttaactacttatttttatatacaattaagatttagtcaatgtctatatatgtaaatttataatataataattttatgcttcaattaattatgtaattattagagtattttgtaataaaaattggagttactcaattactgaaactgagtaactccaattcttacagcctcaaattaactcgaattattgaaaatgattcataaacattatcctatactctcacttatcaatttatatacttgagtaatacctttttttattaacagaaatcatcttactaacaattgaaattgtagttccagtacataatattgaaaatatagttccaaaccctaaatttccgcctaaatatacacctaaaattaaaaatattaaatctgctatagtttttaaaactttatatggatacttaaatttgccctcaatatagattaatatagcatctaaagggctcattccaatgtcaaattttataagcattgcaaatccactacacataagtatatgtccaattataaagctcattattctaatgataatccctaaactacttatattaaaatctaataataaatatatatacaaatctataaatattcctgctactaatacataaacacagcttcctaatcccaaactttttttattcaataacaatgctataagtaatagagttccattatatattagccctgctattgtataacttatacctaactttatatgtataccctcatttaaaagtgtaattgcatcactaccaaggcttgactgaagtataagagatataccacatcccagtatatttataattaaaattacaaatataaatttttttatgacattcataattaataaaccaccttatttataattataatccctcttataaaactgtattaataacatagtatttataagagggattatttatatttaaaaactatctactttttcttttaattcttctccattagttcttattacatttttataccaataaaaactatcttttttgtaacgttctttgcttccatttccattgttatctatatctacatatataaatccatatcttttttccatttcttgagatgaacaacttactatatctattggcgaccacatacaataagctaatatttcggttccatcagctatagcttcacctatttgttctatatgttttcctaaataatctattctataactatcatgaacttttccatcttcaaatttatcatgcattccaaatccattttcagctatcattattggcttttgatatctatcataatattgagataaagtattgtataatcctttagggtcaattgcccacccccaaggatttgcttttaagtattgattttttacattatcaattggattcatggtatttttacttgctgatactgttgtagagtaatagtatgatagagctagaaaatccatagtattctcttttaacactttatcatcaccttcttccataactatatttatgttattttctttgaagaatctcttaatataagctggatactcccctctaaaacttacatcagtaaaaaaatattgtattctatttctttttaaagcaaatactacattttcagggtcgcaatcttctggataagatgtacaatctgccatcatcatccctatcatcatatctgaatttatttcttttccaagcttcttagttaaagctgtagccatgaattgatgatgaatagcttgatatttggcctcttctacatcatctacctggtctacacaaaatgcaactgaattaaatgattcatgatacattaaatttatttggtttataactatccaatatttaactttatctttgtatctatttaatattaattctgcatatctaacaaagaaatccactacttttctattagaccatcctttatattttaatactaaattcaaaggagtctcataatggagtagtgttacaataggttccataccattatctattacttcatttataagattatcataaaactttaatccctcttcattaggctctaaatcatctccatttggaaatattctagcccaatttattgaaaatctaaaacactttaaccctagttctttcaaaagctttaaatcttctttgtatgtatgataaaagtctattccattacgcttaggataatacccattattatctttcatagcaaactttattttatctacagtcatatcagactcgtaatgtttagatatatctctatctttatcatacatatgtacatcagctaagcaccaccctttgccaccttcattccaagcaccttctaattgattagctgctacagctccaccccacaaaaaatctttaggaaacttactcaatttaatcactccttattttatttatttaaatcatttactattatttaccttatattctatagactttactattcctactaaagacatagttatatttaactcgctgaatattgtcataagagtatcttgagcatgtgcaaataaaagtgaatgtgctcttttttctccactagcttccccttgtataatgttagtttgagctctatgtgcttctgtcataaactcttttgctttagctagttttaaatcagcatttttataatcaaacctttctaaatcattaagagcatgtttaatttctgttctagcctcacctgcacgaagtattatttgcattgctacttctactaattcttcatctattacatgttcttcagttgtcatatttataatttcctttcaacatctaaatttaagcttcttgactctctaattttagttcttctttttcataagctttaaaaaatggataccatatcatgaatagcaatactatatttattgctaaaacaataagccctctaacatcttgatttaccataaaagtagatataccaaaaggaagataccataaattaaacaccttactcggaattgtcacaaatcccatactcattgataagtaagtagttattgatattactactgttcctatccacataggtaacattaaaaatgggttccatgctactggagctccaaacattactggttcatttatgttcattatagaaggaacgatacaggctcttccgattgcttttattcttccagctctagataaacacatcattagcactagtggtaatgttgctccccacccacctaaagttatccaacctgtttgaacaacttcataagtatatatattagttgcaagccctcctgatgctacagctgctgcattagctgcaattgcactaagctgaattgcataagttattggggataatacccatccacttatacctaaagaatataaaaatactactaagaagtttaatagtacaaatccaggcaatgtttgtgctatatctgatactggtttaaatatcctaactattatttcaaacatatcaaagttaagtccataaattagtccccaacctataaacattattactgctataggtaacatactatcaaaccacttacttacaaaatcaggaagtgctgaatcttcaccaaaaaatgagaaagacccaaataaagacattattaatccggagaataatcctgcaactagtgctacaagcattccttctcctccaaatctattgaagttaaatatagctccttcattcgtaatctctggacgaatcatcattaacattaatccagcacctgcaagaccagctactacactcatactttcaaatttcttattcttcattatttccataggtaataaaaatgctataaatagtcctaaaagtccaaatgtatattgatttattggacttaaatcaggtaagaaacttatgtaattcttcaagacagaaactatagttactaaagaacctacaaataccataggcaaaactttcattatagttgattgaactgattgtacccatatattcttagttatcttatttacaacaggagtaaacttttcacttaacaaatctataaatttattcataaacaatctccccatagatattttatttgtttaatattaattctaatgcttcttctaaagcctttacaccatctaatcttccatatgctgttttagatatacatgctactggaacattatattcatcagcttttttttgtatttcatctttcatataatctaaatgtggtcctaataataaacaatctatttctggtaaatatttatctatctctgactcacttctagcttttatatctgcttctatgccttttttctttgcactctttctcatactagttgccataaaacctgtacttgctcctgagccacatgccaacaacacttttatattcttcataacaatacctccagtatttttattcattaatttatttcttaatgaatttttatttgatttgattgtatttatattgtacttcctaaataatttcctttcacataaatatatttcctaataataggaaatcatttactcttaaccagacacataaatatatagtataatgtacattataatacgtacattcaattatataaatatcatatcatacagattttattttaaaactatgagagggaatctaatgaaaacatctaaaaaagagttatttttaaacttcataaaaacgcaacatgattggatagattcatccacattagctaattatcttaatgtatcaacacgttcgattagaaaatatgtaaatgaaattaattctactggtgaatttatattatcctctaaaaaaggatataaagtaaatctcaataataactgtcaaaccaaggttgatagttcagaaaatatatcacctgataacaggttaaatttaattttaaaagaacttatagttaatagtaatggaattaatatatttgatttaagtgaagaattgtttgttagtccagctactattgaaggggatatagtcaaagctaataaatttataggaagttataatttaaagataaagcaatcgaaatttttattgaaactaattggaaatgagtctgcaaagcgcaaattaatgagctctataatatttaaagaaacgggaagtgattttttaagcttatttgatgtacaaaaaatatatcaagagtataatttgaccaaactgaaagaaaatataatatatatattaaaaaaatacaatttgtttataaatgagtacgctataaataacatacttcttcatttaatgataactatagacagaataaaaaagaataactacatagaatctgtcgaagtagtaaactacatagataataataatgatataagcatttcaagagatatatcaaattttttagagtctgaatacaatttaactttaactagtgcagaattatactacttagtatttcagttaacaaacaaaaccacagtcttaaattatcatgaaatggatactaagtcattgccaaattatatagatgaacattttgttaaattaactaaaaaaataattaaaaatgtatatgacttatactttatagatttatctgatgatgaatttgttgtaaaatttactcttcatgtaaaaaatttaatcagtagggctaaaaataatcaagttttgagaaatcaaatacctcagaagttaaaagattcctaccctctgatatatgatatatctgtttatatttgtaatcaaattcaaattttagaaaacatagaaatagatgaagatgaaatatcgtatatatctcttcatgtaggttcattttttgatagacaaaaattactagaagataaaattctctgtgcattaattactccaaattactatgatttacaattcaaaatagtaagagacctcgagaagagatttaatgaatccatagaaattattcaaattttttcagatactcataatcttgattttgacaataaggtagacatggttattactactttaccaattagtgatagatgccctataccttttgtttatgtaaatccttacctaaacagaaaagattatgataatatccaaagtaaatttattcagattaaagatagaaaaaatatacttactgtacaaaatcatttagaaatgtactttagtgaatctttgtttatgaaaaacatatatttagatagtgctaaagattacataaaatttatgggaaatattctgtacaaaaataaatatgtcaaacccaattatatagatgatgttcttataagagaaaaaatgtcttcaactgcatttaataacaatgtagcaattcctcatagcatgaaaatggatgctttaaaaactggagtatgtttaattgttaacgataaaccagttaaatggggtgaggaaaaagttcaaattatagctatgatacctataaatgaaaaagaaaaagaaaaattcaattacatatttgaaagctttattgaaatattatctgagtggaataatgttaaagaacttactaaggcagataactacagtagttttatgaatagaatagcttatcttattcaaaatatctaaatccattaatttatttccaatatatgtttcttaagttattaacacaaaatagataagctgtcacactaaaaagtctaaattaatatgtgacagctttttacctaatatactttgctttaatactacatattttttgattgttgtatactagttataagattgaatatttgtgttgttgtagctgtcatattctcactagcagttgctttatccattgcttcttctattgtcatagctctatttactatagaaaaataagcatctataccctcttcattacatttaactgcatcttctgttgtggctccagccaaacctattacttttaccccatatttttttgccagttttgcaactcctattggagccttgcccatagcagtttgattatccaatctaccttcaccagttatgacaaaatctgcatcttttaactcttcctctaatttaatttcttctaatattatttttattccagattctaattttgaatttaaaaatgctaaaaaagcaaaacctaatcctcctgctgctcctgctccttctacattagctacatctttacttaagtaatttttaactactttggaaaaatttctaagcccattatctaactcctcaattatttctgatgttgcacctttttgagacccatatatgtatgcagctccatttttcccaaacagcggattatttacatcacaggctattttaaacttacattcatctaattcctttaatctattttctatttttatatgtcttatttcatttaaaacttttccacctaatcctactaacttgttattttcatcataaaactcaaaccctaaggcttgaagcatacctatcccagcatcattagtagcacttccacctattccaactataaaatttctatagcctttatttattgcttcctttattatttccccaacaccataagttgtagtgtataaaggatttctaagttcagtcggaaccaatgttaatcctgatgcttgagctatttctattattgctgtacttgtattttttaataatccatatgttgcatccacttttttagctattggtccagtaacttctatagtctcttttttaccattcatcccttgaactaaagcatctactgtcccttcaccaccatcagcaagtggcaatatctttacttgcgcatcttctttaaccttcaatatccccttttttattgcatttcctgcctctattgaagataaacttcctttcaaagaatctatagaaattaatattttcatatttatctactcctttttatttactctttattttaaatatataattttataagcttaatttatcttttattttatactctatatttcactttgtatacaacttatacccttaatattcttttatcttataaaaaagggagtgtctcaaaatgaactttttagttcatgagacactctttttgtataaaattaaatatatgtttattatttcaacaatgataaggaggattatctctattttaagataattcctttttagcactatctaatcatttttagcactatttaaccaatatagttttaacttggttcattaggcactctacatttacagagttattatctattgatatagattctaattctttttcatttaggttagtccatttagctgttttaatatttttgttaaatactacgttagctgattttgtttcttctttagaattgtaaaatctaactactaatgcctcttctttttcagccttttttacaacacttaacacaaggtccttattagtttccttaagtaaactatatgaataatctacttctatttctgattgattcaatttcatagcattatatggtattttattataagtttgtatttttgttaaatactctttagccatatttgcaacatttgcttctagtgtagatttttcatgagtgactattgctaagtctatttttatatctcctatcatttgagaatctggagtaggcaactttattcctgatggacgacctgggcgtcttgccatttcttctttacctaggaatcctacacttctaaataatgttatagctattgtgtcaaattttttccctactatttcaaactctcttgtactgtttgtaagaacagctactccatgctctttgtcagacaatccaacgaatgttagcattggatatatagaatctggtctttcactccattcttcctgttgccaaacttccatagcatcatcatacacacttctctttatatgtccaaactgattatcagacacagaaaactttgaagctatatttgttggtatataagttctaaccctacaatctcttgcttggttatttatattgaatactacatttattatagctttatcatttggaacatttataactatatcaaagtcaataaatgaatctgctctattattttttctagcttgtatatcttttggtacttttaatctataatttatctttatctcattattaaatctatttttctttatagtggaatttgctactatattatcgttaaatattaatttctcatttggaagtggtgaaaaatcatactcatctccttcatctcctccattttccatcaataatacattttcaaaagttttatttaattttttatcagatatctttaatgtcccgttttcattaacttgaatagtataaaagtcattatctaccatgtcacatacttcataagctttttctaacatatgttcaacttcttttatcatatacgccttataccccattgcaggtattttatctttaaagtttattgtatataccataaatgaatcatagtttccataatgaacaatttgacggtctattaatcctgcatctattacttctttatgtaccacttcaaaatccaacttattattatctttatcaaatatttcaaatgctttcattttagttataacttgggcgttcactatttcattcctattgtaaggcattaagttaaatgctactaacttatctaaagccatttcacaactcattgcatcaactattcttcttttgtaaaatgttattaattggtctactttttcctcagctaagaaaaatctattcattatttcctggtgaactttatctgaacaacaacatccaatgctgtcatgagcatgatttttcattatttctttccaaattaactctattaatccatgatgatattcaaatcctagagaatatgcaatagaagctagtggctccaatatgttggttatctttgattctattctagcatttgctgattttatatccattcttgttgagaatatacttctatgaaccctcatatatttcccatctaaaaattccccttttattgtatctatatccttatttttttctagctctttaaatatgttttcatatctacttaagaaaaattttctctctggataacattcttttaatttatatataacttcaaatatattcttttgaattggcatttggtcatgtccatttggaagtattatatggtcagtagttgcacccttatcaagaaccggtaaatatttatccattcttgttcttagctcatcttcattcattggtagatattttcctattgcataacctaatggaagtatttgaaccaaaacagaagacccatcatcactcttccaattaaactctgttttattagttccttttctttcagaacatcctctccaaaacattgagtattttatatcaaacccatttagtatttgcggcatttgagcactttgaccaaatgaatctggtaaatatcctattttcatatattctccaaattcatcacaatcttttattccatacagtaaatttctaagtatggattctccaccaactaccatttcatcagtttgagtataccaaggacctattattagccttccttcttgaactaatttttttattctctccttacattcaggcttaactgctaaataatcttctaatatagcagtttgaccatccatcacataatatggatagttatgattattttctaacatatccattatttcttccatattatttacaagtaatattctagattcctcagttgagaagtaccattctctatcccaatgcatatgaggaactatgtgtacattttttttcattgcttatcctccaaaacttatctgataatattttctgtctaattaaaaatccaataaaaatactactgagtttacacaattttttaatatttattttatcactataattaaacctttgatttaaatatctaataacgtatcttttaatgtatctttctttgatttttttgtttcctagttattattaataatattgctgatattatagctccaagtactgccgcaaagaaccatattgatgctataataaatcctgacatacttccctctaaaagcgccaatgagaatatccccgctccaggcacttgaagacctatattgaagaatgctactatagacccagttatggctgaaccagctactaatgatggtataacatggattgggtcctctatcataaatggtattgcaccttcagttattccagccaatcctaatatccaagtttgctttcctatttccttttctgattctgaaaataaatctctgcctaaaacagtagctattgtaactccaaaagctgagaccatcttaactgatgcaaatattgcataaggtataaaatttccacttgctattgctcctattgcaaatgtataggctgctttatttattggtccacctaagtcaaatgaaaccatagctcctattattgcacctagtagtattgcatttattccagtcatcccatttaaccaatttataagaccattgttaagtgctgctacaggctttcctattacaaataacatcaataaacctactaccaaagaaccaactactggatatacccaaaaacttacgaatccagctaatgtgcctttggctggtatattcttctttaaaaattttactatataaccagcaagtaaacctcctaacatacctccaagaaatccactacctattaaatcagctgctagacctgctgcaaatcctggtccaagacctggtttttcagctagtgagtaagacatatatgctgataatactggaaccatcaatgtacctaacatccctccagaaagctttcttaattgccataaccaagaaccttcttgattgtatagttcttgtaaaccaaatgcttgagatgctaatactgcaaatgcaagtatcatacctcctgccacaataagtggtattatatgagatactcctgtaagtattgctgattttacatcttttttccatgatgatttttcacaatatgatatatcagatgatttttctatataatcacctttaccttgtttttgtgctacttctaaagcttcgtatattatttcttttgccctttttagtggagctgctactgacgtttttatgtttggcaaatgttcaaatctttctgtatttttaggtgctacatctgttgcatatattattgcatctgccttttttattatatctggtgtatgagggtccaccataccattagctccttgcttttctacatacacatccacacctatttctttgccagctttaattaatgcttctgctgacatatatgtatgtgctatacctgcagggcatgctgttattgctaatacaattttttttgattcattttgaatcctaatctcttcttttatttgttctttcttttcttttatatctaagttattaaataactctttcttagtttttgaatttaacaacatattcatataatcttcattagacagtctagtaactaactcagaaagtatttgtatgtgtgtatttccaccttcactttctggtactgctattaaaaatattagctctactttattatttgagtctacgctttcccaattttctattggtgtctctaaggtcatagctgcaaatgcagcttctttaactgacttagattttccatgaggaattgcaagccctctttcaaaacctgttggagataaagtttctctgtacattacagcttctaaatattcctcataagatgttaacttgccttcatcatatagctttcttgctaagaactttattgcgtcttcctttgtttttattttttgttttaaaaaaacaaggttttcatttgtgattttcttaaattccaaaattacgacctccttaaatcatttaatgttatgaatatagcataaaataaatcatgaaaatgtttttttgaaattatacacacaatttcttcttaaaaaataaggatttgtgtatttatacacaaatctctatcttaaccagtattgttctattattgctctcataatcatcataattggaaccttatctgatatattgtacccatttacttgtttaattgttgaatagcaatataaacttatatctgcaatttgttgcaattgattttcacatatatgtgttagagctactaccttacaacccttattaactgctgtctttgctgcttctataacttctttcgtttctccacttaaactaagcgcgaaaaacatatcttgttcacctaattttcctatatcatgaagtacttcatgtctttggctatagtaagttatattatcatgcccacctctaatttcttttactaatatctcacataaaggaatgttttgacctattccataaactataatactcctagatttttgaattatatctgctactttatttattttttcataatctattagctctaatgtcttttttatatctgattcaaaaccattttttggctctttatcctcattttttaactcttcttttaaattgttttttagttgagagaaaccatcatactccatttttttacatagcctaactatggtatttgggacagtaaaaaatttatctgctaaagattgtattgataattttactatttcttctttgttttttctcatatactcaattatcatgtcttctgtatctgtaaatttatactcatatttttttgctctttcataaaattccatagtttctcctccatctattttattattcataagtaaaattcaaaaatattagctaaaattttcgttaatataattataatttaatatttttaatttattaatgcatactactctttttattatacataaaaaatgtgtacttcctatattgatagagatgattcaggtttttattttgatacatctctatcaatatttttttagaaaatacacatttttttcaaatacttatttttaattaaaactttaggtaatctattctttatatataattattagacttgaaaatatctttaaaatcaaccaattcaatattatttctttttaaccacattttaacttccttatcacatagcattgcatgttcatatactctctcttgaataagagaagatgattttataagactataatctataaatcctggatgagtaaccatcaatgttatatctttatctaaatttatatatttttcttcaaataatttaacaaaagatttatttaacttgtaaaaatcattctgaggatatttacttggcatgctaatacatgaatctaaataatagggacaacttggtataccgtattcttttgcagcatcacacattgctgatattgatacatcttcttctataccatgtatatcaatatactcaggcaatttactcatatacaacttgtaagtttcaatttgagcacaaacttcttcatatacttcttcataattaaaaacctctttacctgtcagtagttgcgttcttcttattttgctagaaacaaattttccaccttcatctaacaaattctttatcttaatatgttctttacaacaaggttctcctattactaaattaacatgtaaaccaaaacatacatcatcattttttaccatttctatagcttgtcttgaaaaaggcatattcaccatgattccagcacttgtaacaataccgttcttataagaagatattatccctagtgtaacaccttctgaatatcctatatcatctgccctaactactaatttcttcattttatgcatctgcctgctttctcaactcatcaagttgcatttccatctcatcctttactttaacaacatccgttcctatgatgatttgaactgatgtattactcaatttaattacccctttggctcctgtttttttaatattatcatcattcaaaatagtggcatccttcacttctaaacgtaacctcgtcatacaattattaagagtcactatattttcataaccaccacaatttttaattatctgcttagccatatatgaaaaattaccatgagaaagttttaaattcttttctttttcactaactttatcacctatctctatctcaacttcatgtcctggtgtttgtacattatcttttattattatatatttaaatgttacataatataatacaaagaatacaactcctacaggtataactaaccacgctttatctccataactaaaacttaagacatagtcaattatacttgctccattaaatgaacccaagcgagcacccagtaaatatagtacaactccacctagaccagaataaaaagaatgaattatatataactttggagatgcaaataaaaacgaaaattctattggttcagttactgttgccataaaagaagtcaatgctccagcggtcattgcaccttttacttcttgcttctttttatcttgtgctgttttatatatagcataagaaatagcaggtattgaaaacatcataattatgtaaaatcctgtccagaagaatcctgcatttgggtctcctgccataaatctaggaatttctcctcttataacttctcctgttgatgttgtatattcacccatttcaaataatatgtaagcatttaaaacttgatgtaacccagttggtattagtgcacggttacagaataaaaacaagaatattcctattgcaccagctcctcccaaccaaaaaccaaattgattcattgcagcttgtggatatatccataataaactaaatatatatgataaaattaaagcaaccactggtgatagtgtaattacacatttttctcctgcaaagaagcttaaaaatgctggaactttaactttatatgttttattgtaagtccatgctatacaagctccaacaattatcccaccaaatacacctgcatttaatgtatcattcaataactctaaatttgacttaaatatcatatatgcaactacggctgcaaccattacacttgtcttgtctttagactttgaataagcactaactgctcctaataaaaataagtagtccacatttgaaaatactatattagatatattagatatagctggcacattaagcatatttggaccaaataataatcctaatatacctgctgctggcattacagctattggcaccagcatagtctttcctaaaagtgacagttgttgcatcattttgtttaagaacctcttcatatccaatcccctttctatttcggtttaattttttgtgaaaacgatttattcacattttatattttaaatattatatttatttaaacaaattgtcaatattttttattcattttatttttatcatttagtttcatatctaaatccttttaagtatattgctatatctagcctattttttaaatttattttttttatttttaaaatatgtttaaccatgtatttgaaacaacccacaaaatagttcaaatttatcctttttatggtttatataattctattttcactatacatgtctaaacacatttgatataatttgttcatatcagttcaataatattactaaagacctttaaggagggataggggtatatggctaaaaataaattttcagagatatatgaagtattgaaagaggaaatacttgatggtaaatatacaagtaatatgatgctgcctactgaacttcaacttattgaaaggttttcatgtagcagaaacactgtacgtagagcaatttctcaattaaacacagaaggatatgttcaaagtataaaaggcaagggtgttgtagtgttagaaaatagttgttctaatgatttttttctaaatatgcacaatttcaaaggtgtagaatcgattgtagaagataaaaaggttaatactgctactagtgttctccacttcagcaaaatcttaattgataataagttatctaaaaagacaggttttaaagttggtagtgaagtatattaccttcacagactaagatatattgataacatacctaaaattctcgacattaactattttctatgtagtatagttaaagaccttgatgtttctatagcacaaggctctatttataaatatatagaagagtgtataggtacaaaaattgtttcatccagaaagatatttaaaattgaaaaagctacagagcttgagttaaaaacgctacctctaaatgattataattgtgttggtgttattaaaaatagtgtatatactgatgatggaaagctctttgaatatacagaatcaaagcatacacctgaaacatttgtattcatggatgttactcaaagatattaaaaaaattatgtttaattaaacataatttttttacgtttagacactttatcccatactaacctcactattctatatacaattatatgtttatacaaataattatttattgtatattttagctttaatattagtttaatacttgacaatttgtttaaacatattataattaacttataaattacaggaggtatcaattatgaaaaattggtggaaaaaagcaactgtctatcaaatatatccaaaaagtttcaaagatagcaacaatgatggtataggtgatataaatggtattatagaaaaattagattatctgtattctttaggtgttgatttattatggttgactcctatgtacgtttctcctcaaagagataatggatatgatatagaagattattataatatagacccaaaatatgggacaatgagtgactttgaaaaactcttaaaagaagctcataaaagagacataaaaataatgatggatatggtcctaaaccatacatctactgaacataaatggtttaaagaatctaaaaaaagcaaagacaatccatatcgtgattattatttctggaaagatgctaaacctgatggttctgttcctaataactggatatccagatttagtggaactgcttggaaatatgatgaaactactaaccaatattatttacatttatttgaagaaactcaagctgatttaaatttggaaaatgaaaaggttcgtgaagaatgttacaaagtactagaattttgggctgataaaggtattgatggttttcgtttagatgtagtcaacctactctccaaaacacctggattacctgatgaccctataacagggccaaaaggagatggaagaactcattacgctgatggtcctcgtatacacgaatatttacataatatgaatcaaaaagttttcaaacctaaaaatatagttactgtaggtgaaatgtcatctactacacctgaagagtgtatcaactatactagagaaaatcgagaagaactatctatggtttttagcttccatcatatgaaaacagattataaaggaggcgcaaaatggactaatgaaatgttctctctggataaattaaaaaaagcacaatctgactttcaatataaaatgtatgaaggaaagggatggaatgctctattttactctaatcacgaccaacctagagctttatctcgatttggagatgatagattttttcgtcaagaaagtgctaagatgttagccataacactatttggtctacaaggtactacatacatatatcaaggtgaagaaataggtatgacaaatgcctactttactaaaatagatgaatatgatgatgctgaaagtaagaatgcatactatcatatgattaaatctggtattgatgaaaaggaggcattgcttatacttcaacaaaaatccagagataatgcccgtactcctatgcaatgggataatactatttataaggggttttctaatcataaaccgtggttaaaagttaataatgacaatattagtgtagaaaatgagcttaatgattctcgttcagtattttatacttatcaaagattaatcaaatatcgtaaacaatatgatatttttacagaaggtacttatagattgttagatgaaaatcataaaaatctatttgtttatgaaagagagtataaaaaccaaaatcttcttgttataagtaattttactcatgataatgtagtatataaattacctgaaacttatttgaataaattaaactacacaatacttgaaaccaattacactagagatataattgaaaataaaatggaaataaaaccttacgaaagtataatgatatattataaataaagttatttatataaaaattggtataacaccagggtgttataccaattttactaaattcaaaataacatttatagaatatctatagattacaataattatttgacttctacatcattatatttctttgaatatactttagtcatatagaaatatataggaactacaattatcatcccacctaatccccaaactatcttcataggttcatcaatacctgcttttatcagtaataatatacttataataactgcaaatattggtataattgctcctccaggtattctaaaatttacatctttatcagcatacttctttctcaatattagtacagctaaacatgtaggaatatattgaataaatctagatacaacacttatttgagataatgttgtgaatgaacccgaccatgctattagtaaagttcctatgacagatactataattgctatataaggagctccatttttattagtttttcttatagacttaggcattaatccttgttcaaccaaagcagcagcagaccttggtgtaaatatggatgatgcaatatttatacctccaacagatactatagttcctattgtaattatatacccacctataggacctagcatcttaatggcagcatctgcaacaggagtagctgaccctgccaagccattacccaacacccctatacttattcccagtataagcatatatattactgatactacaaacattaccattaccaatgctttaggtacatttttcttagggttctccatatcttttgctgcaacagctaaagattcaaatcctgtaaaagcataaaataaagttatagatactgctacaaaagctgatgacgcactttgacccttttgtattattacaaatggggtaaaattagaaccctttataaagaataatcctacagctataaataaaactattggtaataattttcctatagtcatgatattatttaagtgcttagattgtttcattcccataaaatttataatcccaagtcctacaactaatataccaattattatatttttaataagtggttctgctgcttgtggccatacagatgatagtgttacagcaaaaaaatttgccatagtagcccaagcaatcatactaactatccacttcataaatccaacttcaaatccaacaaaatctccaaatgcctcttttgcataaagataaggccctccatcagtatcaaaccaactacctgcttcagcaaaacataaagcaatagaaacagctaaaagcatacaaaaaactaatactaatatacttgctggacctatatctgtataagcatcaccaggtaacccgaatatacctgaccctattattgcattgattcctaatagtacaatactccaaaaacctaacttaatgcctttttccattgttattccccccaaagccaacttaatatatttatattttttatttagatgcttctttaactattgccataaatatttttttcatattatcataatctctagtcatcatttctggatgccattgtatccctattacaaactcacttccttccttttctatagcttcaattaaaccgtctttagatgtagctgaaacaatatatcctggtgctactttgttgacaactaagtgatgaaaactattaactaaaacttctttttctcctaatatttcatataattttgtcccctcctttatctgtactgtatgtgtaggtacattagatagatgttgctgattgtgtttaatataagcaccttcaattaaagataaatcttgatacaaactacctccttcagttacatttataatttgttctcctctacatatacctaaaactggttttttcatatctaaagcatgttttaataatttcatatcaaaactatctctctttggtgatattgcccccaacttattatgaggttcttctttccatatgagtggatttacatcttgtcccccagatagtataagcgcatctatattagatacctgctcctttataatctcatcatcatatacaatcggtacaatatatggtatagctttacacataactactgattgtatataatcattatttacataagccctttcatagccaggaaacattcctccttcatcaattagtaaattacctgatattcctattattggatatttctttttaaccaatttcttcaccccttaacttatttgtgaacaataaaaaatgctacttctcttaaagagcaagtagcataccaagattttatttatttgaacattataattcattttagaaatactttttttgaatacaagtaatataaataactttatttacttatattttattttaatcctgtttagtttgacttttttaaattgttttaagtacaactaataggtaaaataggcatttagattttcctttttatcaacctattaaatactgtttaatatattttttccccttctatttaattcacttccctttctaccagattcacatattatcaaatccagctcttttaacatattaagtattccccttacctcaccttctgttatactgtagcctaattcatttattgaattaacaataccatttctacctatatttttattaagattattggcattttttaaacactccattactaactttactttctctatagatgttctatcctttaatatgcttatttctttactaaaatcttcagttatatttaataagttatgaggtaaatcatttattaaaataacatcctcagaactcataatgttaatatacatagcagtattttttaattctcttatattacctggccattcatatgcattaataatgtcttgaacaccttgactaattgctctcttccttttcataaaatgctttaacataacttctatatcttcttttcgctctcttaaaggtggtatatttatgggcaatacatttatcctatagtataaatctgctctaaatctatctccttttatcatttctaataaatttttatttgtagccgcaattactctaacatctatatctattacattttctcctccaaccctcattacttgattctcttgtaatactctaagtaatttgctttgtaagtatataggcatgtctcctatttcatccaaaaatatagttccattgttagcctgttcaaataatccttttttacctccttttaaagctcctgtaaaagcaccttcttcatatccaaaaagttcactttcaagtaaattttctggcatagctgcacagtttatcgctataaatgactgactatgtcttggtgatgcattatgaatagactgagccataagttcttttcctgttccactttctcccgttataagaattgtataatcagattcagctattttcatacctaatttcttagttctttccatcttcgttgaaactgtttttatatcatcaaaagtatatctagcaacttgtcccttttctctaagcttctttgataggttttgctccaattttcttatataagttatttcttgaatacaaaaataatacccagtaacccttccaaaactctctatattatacttatttacgtttaagtacttattattaaattttataacttcatcatgtgccttactcaaactaaaaatctttttaatattctcattctctaattcatctatatttttccctataatattactttgaatatctagtatatcccttaaactattattgcaaataattatgtttcccttatctgataccattgccatacctaagtttgataaatttattatagaatttaattcatctgcttttatagtaagttctttgtatttagtatttattcctgaatataaactaattatttcatctgtatacttaattagcctctcagtaatttctttatcatccagtttgagttttgctattatttgaataaacgttgaactatcaatatacctatggcctaaatcaataacttcttctatatattttggaactaaacttgactctcctggcgttatagctatcttaatatttctatattcttcattgggattgtatggtataaaattcaaatggtttattcctatattgtataaattagatattgtttccaatacagtatgcttattatcgtttactactaatacatctatttcttctggcaatgaaaataacttatatatatccttttgctttatgctcctatttatagttattatctttgagacatcttctacatatttttttatttttaatactctatcatctatcattaccaatattatgtcatcttttattaattccttctctgttattttatttaaataataattttttatcattactttatctttaaatatcatttctagatttttatttaagaaacattctaatttagacaacccatcagttactactgctattgttttcatttgattactccttttaaaatatactctactcttttataatatacatctgattttcactttaatagcacaaaaaattgtacatttagtatactaacatattcctttattagttttatgtccctaaatatcatagttgcaatatctatcatatttcttaaacttctataaagcaaaaattgtgccaaattaataattttcttaattttattctaaagttcctcaatagtatttacagacttagcacttatagcttataagtctttatattattaatctatttttataggttaattgtacaaatcatatatcacttttacctattaaatgcattataaaaaagatggaataacgattcgtcactccaccttttttgtaataaaaaattgtatatataaacactatttactactcttctaagtacaaacagtatctacatactataacctttcaccattagattctattacttgtttataccagtcaaaactctttttcttaatcctagacaagtctccacttccatcatcatacttatccacgtatataaacccatatctcttggtcatctcaccagtagatgcacttactaaatctatacatccccatggagtatatccaaataaatcaacaccatcttctacagcttccttcatttgctctatatgtgcttttaaatactctatacgatagtcatcatttatcactccattagattcttttttatcataagctcctaaaccattttcaactaccatcataggtattctatatctatcataaatttcatttagtgcatatctaagcccttcagggtctatttgccatccccattcactagacttaagatatggatttttcactccacctaatatgttgccacttgtattatcttctttagaatcactacttacacatgtagacatataataactaaatgtataaaaatctacacaaccttcttttaaaatttctaaatctcctttttccatttttatttcaatattattttctccaaaatatctattcatataagttggatattcgccacgcacttgtacatctccacagaaataattcattactctactatctctttgagttttaactgcatcatctggattacaagtataaggatacattgttgcaaatatttgcatacatccaacttgataatttgaatctatttcatgagctaatttaacagccttagcacttgctacaaattgatgatgtaacccttgaaaacgaagttgaggtatatctacttggtttataaaatctgtagtcccttcatttaatattccttgtgataagtagcctcccataggcattgtagctgaatttatttcattaaatgtcagccaatattttacttttcctttatatcttttaaatattgtttcacagtaattcatatacaagtctattacctctcttgaaacccatccattgtatttctctgttattgcaaatggtatttcatagtgagatattgttattaatggttctatattatattttaaacattcatctatcacattttcataaaatttaagtcctgcttcatttggttctttctccattccagttggaaatattctagtccatgctattgaaaatctaaataccttaaatcccatttctgcaaataaagctatatcttctttgtatctgtgataaaaatctattgcttcatgacttggatagaatgttcctttttctataactctcgttattcttttacttactttttgagaacccccagtacacatatctgaacaagaaggacctttcccatctaaattccatgctccttcacattgatttgctgctgttgctccaccccataaaaaatcttttctaagtaccattactctacctccaataatttatttatagtaaatttattttaaaataaaaatacatatatctaatttttaattaataaaactctcttttaagctaaaacagttatcaattcctgactattatttacatgcttttgtgtattttctataatatccacataatcagaataattagtaacaactactggtgtttctaagcaatatccttcttttgatatgctttctatatcaaaagttattaatgtctgaccttttttaatcttatccccttgattaacaaaagatttgaaatgtttaccttccaactgaatagtatttaaccctatatgtatcaatagttcacaaccattatcagatataattcctattgcatgttttgttggaaataaagtcattatagtcccatcaaatggtgccactacttttccttctttaggtgttattgctacaccttttcccaatatacctgttgaaaacgctgcatcttgtatctgctccaaagcctttacttcaccttttattgggctatatactacttctcttttgtttttttctacaacgccttgcccattattatctttagaaatttctactatagaatcatctttccaaaaaaataatgttaaaacaaatcctactacaatagctactattattgctattatagttgcataaacacctttcatatctccagttgttggatttatataattaggtataccaaatattccaagtccacccattacataactttttacattcattatccccattacagctcctgccacagcaccacctacacaactatatatgaatggtgtttttcttggtaaagttattccatatattgcaggctctattacaccacatatccctgaaataactgcaggtatacacagctcttttatcttcttatcttttaatttaaagtacattgctgctactactgatgtttgtgcaaaagatggtacaaatgctcccactaatattgtgtcaaaccccatagtcataaggtttgacatagctattggtactaatccccaatgtagaccaaatattacaagcacttgccacaataaaccagttaatacaccacataaaattggtgaaaagttaaataaagctaaaaatccatttccaactatattagaagcataggtagctataggccctataaccataaatcccaatggtaaagaaactaataaaactgccattggtacaaagaaattctttactacatctggtattattttagcaaacactttctccaacttagctgctaataatactattataattactggtactactgttgaagtgtagttcattgctattactggtaatcctaagaaagttatatatactggtgattcaaatattgttccagtaaatagattgtataaaggttgacctatagatgctagagtatctaattgaatacctgaatagcataaaactgcacctataagcattccaataaatggttttaatttgaatttcttagcagctgtatatccaagaattattggcatatactggaacattgcatctccgattgcatttaacataatatatgcaccatcagtttctccatacaaacccaatgctgtaaatactgcattaaatccttttatcataccagcagcacacagaactcctaatattggttgaaaaactcctgatattatgtctataaacttattaagtaatccttttggcgcatctgaatctgaattatctattgtatctcctcctaatccagccaaatcgcacacaacttcataaacatctggaacatgattaccaataactacttggtattgacctgcacttttcattacagtaactataccatccattttttttagcacatcatcatttgctattgattcatcttttaatttaaaacgtagcctcgttatacagtgagataaactgctaatattatccttccctcctacattctcaatgatttcttttgatagttgttcatatcttctcattttttctcctccattttctttttgaaatatgaaggtttggccaacttaatgtcaccacccaatatatataaacctaattattaggatttatatctgacttaatacttttacttaccactctttcaacgtgaatagttaagtataatttttcctcatctgttaaatcgtagttgtattttttatgtataaattcatccaacttttctatgcatttataagcatttttatatttaacttttattacatttagtaaatcatcttcattattttcatgtaaattattactaacaattcgttctgcaaaatactttaagtgagtaataaatctatgataataaactgaatcttcatcaaatactattctgtaatggtatttaaccatatttgaaatttcttgtattatttgtgtaatctcatatatagtttttatactttgatccatttgtgcattaactatatgcagtgctataaatccagcttcatcttctgatagtctaatttcaaattttttttctatataatccaatgcttctaaccctattttaaattcactcttataaaatctttttatatcccaaagtaatacattttttacacttactccttcacgagctctttctattgcagtatacatatggtctgttaaagaaatataaatactatcatttaatcttttccctagtttttctttagcatataaaattatttcatctgataattccatatatcttataggaatatctgctattagttctttaaatttatcagatatatttgggtctgaaagtttgaatatcttatcaattttatcctttgatatatgctctcctgtacgttttttataagctaaacctctccccataactactatttccttatgattttcatcagttgtaataattacattattattgagtattttttcaataatcattgtgatgccccctttattagcattaagttaaaataaatcttttttaattatttagaatatttaaaatgtaatttattacataaaaaaaaacctatttattacacattaaatagactcccatgagtcctgagtaataaataggtttagcttgtatttaaacaatcactatccgtttgtattttattttaattattatttattatatgttagcaaatttattttttagtgtcaactttttctcaatattttaattctaaataaattatataaattgcatctgcaaagtactatttttataaataaacaaaataaaaaaggtattacttgctttaagtaatacccatttatttttaatttaagtggtttttcttaatctcatcaagtagtccatcttctaaataaatttctaatgcacatcctaccattgcctttactgctttgtgaagtttatcataagcttcctcagaatttgcataatttagaaattctttttcatgaacatataccattggacttatatctaaggctatttctgtatacatagtagggcaaacttgacttacattacctatatctgtagaacctactggaccatctttaccttctaatatatctgttatacctgactcaatcaaattattctttgttatcttttgaagtactttgttatttattatgttgtcaaaagaattttcaaagtatctataagaaagcttagctcctgtcattaactctgcaccttttgcacagtttataacttttttagtcacttcatctaaataacttctttcagcagctcttacaaaaaacttacaagctgctttttctggaactatatttggagcctctcctccatttgaaactattccatgtattctaacatctgattttacatgttgtcttagtgcatttatcccagcaaaagtaagttgtactgcatctagtgcattaactcccatatgagggtgactagctgcatgtgctgataccccttcaaaactaaactctaatgaatctattgccaaagccttacagtttatattattaaaagcttctatatgcatttgataacttacatcaacatcatcaaaagctcctgccttaactaaatcacattttcctcctgttgtttcttcagctggtgttcctattagtacaatttttcctttaaaattttcttttaacttacttaatactatacaagctcctagtgtagatgctgcaatccagttatgcccacaagcatgagctggttctttattgtctccatatccaggaagtgcatcatactcagctaaaaatgctatggtaggtccatcattatctcctaattcagctctaaaagcagtctccatattacaatatggataaactgtatcaaatccatattccttcattttctctactaagtattttgatgatatgtattcttcttcccctaattctggattgttaaatataaaattacaaacttcttcaatttcttttccaagttcattctctatctcataagctctcttctttatactctctatcataacttacctcccactagaatcctagatataatcctattgtcaaaaataccattacaagaattgttaatactaccattaaaggaattacgaatctaacccactttgaccaaggaatattggctactgctagtgctcccattaaaacacctgatgtaggtgttattaagttagttacacctataccaaattgataagctgtaactatcatttgtcttgatacatctactaagtcgccaagtggtgcaagtacaggtattgtaagtgatgcaagccctgatgctgatggtattaaaaatgctattaatccttctattaagaaagttaaatttataaatatagtttttggtaatccatttaataaatttgctgcagaatttaaaattgtatctattataaatccattttctgctattattacgattccacgtgcaaatgctatacataaccctgctgtaattaaatctcctgctccacttataaatgaattaactatctcatcttgtttaagccctgatgctattcctgatattatacctatagctgtaaatatcattgcaatttcagttatgtaccactctagtcttaaaactccatatatcataatcgccatacctattgtgaaaatggctattaccatggcttctctttttgtaaattcctttatatttgtatcactattaaccattgattcttgatttagtgatatatcgtgtactaaagattttttagggtcttttttaactttattggcatacatcataacaaatcctatagatatagccatatatattataaacataacaactctaaactctattccagaacctggtactatttgtgataatgcttgtgctattcctacagagaaaggattcgtagtagctgctccaaatccagctgttgctcctataaatactgtggccactgctgtcaatgaatcatatcccatactggtcataagtggaataaatatcatataaaaaggtagtgtctcttcactcattccaaacgtcgtcccacctagtccaaatagaatcattgaaatcggtattattaaaaattgaaacttcttcattttatttacagtatgagctataacagcttctatagcccctgttttattaactatcccaaaagctcctccaactattaaaacaaatccaactacttcagctgcatctataaatccgtttataggtgctgtaaatacatcagtaattccttgtggatttgatggtgctttttcataagttccagctacaacaactgaccttccgtctatatctactctttcaaaatttccacttggcactatccaagtaagaattgccattaacactattagcgaaaatattattgtaagtgtctgtggcatagtaaactttttcttttttaaactgctcatttttaatctccccactttttaaattaaatattttattattgcatccctttatcctattttgtatagatgtaaaaaagctcaacatggatacatgttgagctaaatgtgctaaatacaacatacctgcatcttccctttatcttgtttaagatagctctccatcaaaattcgggataattttgatgacagtactgtacctattaaatacagtcccagcactagctttggacactagcacttcggcacttactccttttatattgcctcattggtttccaacctcttcaatattaatcttagtaaatgcaacctctacctcaatctgttcgttagatgaggtaattcttattaatttttattgattcaaagtaattgtagcataatatgtcgagattgtaaatattttcagtataataattcttactttatgatgtcattccatttttcacaaataattttttctccatataatttaaatactgtagtatattttaaatacacacaaactttccacaaatttttaattattataatacctttataataaaaaataaaagccatgtaaacttatcaatttacacagctttatatacattaatctactccaagtacagctttaagctttgatgctattgtaataactcgtggaccaaatataacttgaactgagtttttctttttaacaactccacttgcacccaattcatttacccagaaaccatcttcatagaatccatcaattgaatttagctctaccctaagtctagttgcacagtttgtaacattttttatattattacttcctcctaaaccttctattatagaatgtacaagctttgtatctttatcatctacttcctcttctactgcattgttgtatgctgttttaccagcatctacagattgtctttctctatattctttcttactataaagcttaacttcttctgaacttcttcctggtgtttttatatcaaacttcttaattgcccatgtaaatattatataagtaactataaaaaatattggtatcaaaaataataatggtaacgcatccactttttgtggttgtaataaattaggaaacatatttctaaatgattctcccattatagaaacattaaacatttctgtaaatacatacgtcaatcctgccagtggtacatatgctacaaaatacaataatggtgcaacaaataggaatgtatactctattggttccgttacccctaccaacatggctgttactattgctggtatcaatatacttattgcttttttcttattagcattatcagccaacttatacatagctaaagctgctgctggtaatattgcaaaatgtattaataaacgacctgttgtgaagttacgagttatataagatagtgtatctgggtctcccatttgagctaatcttatattattaacaccctcgtaaattgctccacctacttccattgttccacctactcttgtatattctatagggaatgcaattaagtgatgtataccaaatggtaataatgctttatccattgctccaaaagtaaatgttcctaataatccactagaacctatccaattaccaagtttagataatgccaaccctactggtggccatataaagtacattgctgtacccaatactattgatgctataaacatcataatcattgaaaatcttggacctgagaaaaaagataatgcactaggaagttctatgtcaacaaatttgttatgtactgcactagctacaaatccagctattatagctccaaatatactacaatcatatgaaaagattcctaagaaagaaccatataaagaacttcgactatatgcttctgcctctcctaatccagatgccataaacgcttctgctgtaactgtatctgaatttataccatttgatgctaacaatgtacttataactgtgtgcattcctataaataaaacaattcctcctaatgcaccccatcctttttcctttttagataatccaaaagctatacctgtaacaaagaatattggtaagtatctcattaccataaatcctaaatcgtttattactttaaagaatacatttataaatgacccttcttttattagtccgctaagccctaatgcagaaacgttttccatatttgcaaaagctgaccctaatcctataaatactcctgctacaacaagtaatataacaggtatcatcattgctccagaaagtacttgtaatttatccttcatagtattatttcctccatttttattgaaatgccaggctatataatgcatatatatatacttctattgctttgtataatgtatctatacttatattttcatttgcctgatgtgaatttggattatctccctctattgtgggtccaaatgcaactccattttttaacactcttgcataagatgcagctccttttgtaaaaagttcggcttcttttccaaaaccttgtttatatgcacttgataatttatttattaattcactatctggttttacatacagtaattttaaatccttatatatatcaactattaaattttcttttttcccaatttcattaattctattagttataaactcccaacttatacccttaggatatctaaagtctattttcatattcaattcatttttctctaagaagatactcattatacatattgtagaaactcccatatctacatcttctttatatatccctaatttttttccatgattatcatctgtaaagtatgaatttaaaatatcccttattataacgcctttatcatttagctttttaattttctctaaatcttttgctaaactaaatgcacagttatatgacctgtgtggatttctcgataaagccctttctcctgtatatcttactaatactttaccttcttctagttcttctatctctgtataataagctaatgattctactaaatctttcttatcatcagttttaaaaacagcctcaattttgtcacatacaaatccatcttctttgtttgactttatatcaactaaattgtgatttctaaatttatctttatctattttctttcttagattgaagtataaaataccattttctccatttactattgggaagtttccatctggagaaaatgcaaattttggctgttcattgacactaaagtaatgctccatacattcccaagtcgtctcttcagctccacccactatcaatctaatctttctcttcggcttttcattaagttctcttaagaaaagtaatgcatataaaatccctatcaaaggtcctttgttatcattaactcctctaccataaagatagttatctttttgacatactttaaaaggtttactcttccaaagttctttattatatattggcaccacatctatatgattaagcacccctactacttcttctccttctccatattctatatgaattgcatatccatcaaagtcttttacaacaaaatctttgtcttttgctatttgaataagcttatcgaaggcatttcttatttctatcccaaatggttgatttatatctgttgtactttcatctctaattgaaggtatttcaactaaacttctaatatcctttatgatattttcttgattggattttaaataatcaataattagttctttgtttactatcatcttaattatttatcacccctttatattaattttacaaagcatttcagttcatatctacattataaattttgaatattattttttcaatatttcaaatacttctctaaattaccataatgatacggtaaacaatcaacagattatgacaaaatcatactatacctattactaatattttaacttatctattacgtcttttttaatgtaattttattccaaaaatagatataaaaagatgtagccttagctacatctttttatatctattcaacttccattattatgctattaatatctacatttccaggttctatcctatcttttactgttctcttaacagaatcagcatcatccattataactacaggagttattatatttaaatcatttgacgttataaaatctaaatctacttccattattaaatctttagcttttaccttatctcctgcctttaccttaacatcaaacggctttccttctagtgacattgtctctaaacctacatgtattaatatatttgtattatcattactcttaatcattattgcatgctttgtatcaaatacattgactatttcaccatcaacaggagaatataacttaccttcatttggtattattgctactccatctcccatcatcttttgggcaaaaactgcatctggaacatcttctaagttcactaaatttcccttaaaagggctatatattttctcaatcttattttcttttttcttaaatatattaaacataacacactctccatattataaaattttatgataatatttttcttaaagcttttgctacaccatcatttacattagtatcagttacaaaatctgccatagattttacttcatctgtagcatttcccatagcaataccaagacctgcaaatttaatcatggatatatcattttcattatcacctatacaaataacttctttgctatctatacctaatatatcacaaaattttttaactgcaataccttttgaagtacctttactcataacttcaaaatttatctttccagaacttactacttctaaatcttcttgttttttaaattcttcctttgcttctctcaaagaatctacgttttctgagaaaagtatacattttaaaatttcattatcagctttttctaataaagtttcacaacttgcattttctattatttcaattctgtcttcttctttatttttactatttattaatctatatggatgttcttcacctatttcattgttggatataactattttacagcctttaaaatgtttgtttaaattatacttttcacctattgtatagattttctttatagcttctttgctcaaaaccttcttatactcatatcccattaatttaaaatatgtcccattagttgatataatatatatatcatcccctaaaacacttgtaaaatatttcatagcattataaggtcttcccgtaactaaggctaccttgatacccttttccatagcttcttttagtgctttaatattttcttctgatacttcaaatcctttccccatcaaagtaccatccatatcagtacaaattaatttatatcgcatttgtatcacatcctagtaagatttttctaatatttcaacaaggtcttctttctttccaaaaggtaaaaatcctaaaactggacagcttgttatttgttctaattgttcctttgttacattaaactcagacatttttgtcttaagtcccactctctttaaaaaactttctatttcatttcctaaagttttagctgcttcatcatcttccactttttctaattcttggtttagcattctcgctactttggcaaatttctctatattatccttatagaacttttctgcaaattttgggaacactatagccaaagcctcaccatgaggaatatgtgtaactcctcctattatttcacttagtggatgtggtgctgctgctccagcatttgccagtgaacttcctcctaatgtatctgctactgctaactttgttctgtattctatattatttttatcttccattactttaggtagatagttaatgactaattccatagatttttcagacattatctctgtaaagtcattagcatttggatttatataactttcaaatgcatgagtaaaagcatcaaatgctgttgatgcagtaattctctctggcagagttaacataagctctgggtcaactatacattcttttgagaaacaattttgatgaaatattgtatttttctcgcttcctctcgatattactgctgcttgtgtaacttggcttcctgttccagaagtagttgatacagctattaatggtaattctttttcacttaccttatcgtatattttaaatggatttgtatatgtactaaacatataatcccaatctattttttctaaaccaaaagtcaatgctaatacttttgcagtatctatacttgaacctcctccaacagctaaaacaacatctacagattcttttttagctaattcgaacccttcatttattaattctacagttgggtttggctctactctatcaaagtgtacaacttctatacctttttctattaaattcaatgtaactcttttatataacttgtctaatggctctacatttggagtagtaactaacaaacatttctttccatattttcctattattctaggtagttcacttaaagttccttgtccaaaatttattcttgatggttgataaaagttaatcatatttttcctcccttaaattattgacttcatattcaaattatacatatcataggatttttaaggcaataccttcactgttaactcttatttactaaagcttatggcaattattagacaataaatgttttattattaccatatcattatgtaaattttattaagtacccatgttataattttataatcaatcttattgtataattgacttaataataaaaatagagtatatacacttttttatgacaaatagcttaaaggagaattaaattatgaaatatttgatagacagtgctaatcttgatgaaattcaaaagtgtttaaagtatggatttaagggaataacagctaatccatctatgtatcttaaagagaaggtaaacttccatgaatttattgagacatgtactaatttaaatccagaaatattaactgctgaagtcattggaaataatttatacgaattaattaattcatgtgataagatattaaatataaataaaaacactataataaaaataaatttctctgaagttggcttagaacttataaacatattaaatagtaaaggtgtaaaaactgcatgtaccttgattttcaatgtaaatcaagcatcattagctataaatgcaggtgctgattacctattcccttttataggtagaaatgatgaaaatgggaatgatggtataaaaaaccttacagaaatatgtaaccttatatcaataaatggatataatactaaagttgttgcagcttctattaaaaatgtattccacttaactcaagcatctctttgtggatgtgattatgcagctgtaacatatgatttatttaaaaaagcttcttttaaccagcttacagtagatggtgccaatacttttgaaagagattggtccaaggttaataaatagtaactaagatttaggagggtttgcattgaacaaaagattattagatattgctgaattattactcaacagctcagactatattactgtagatactattgccgaagaattaaaagttagtaataaaactattcgtaatgaccttgttattttagatgaatggcttttagagtttaatttatccctagataaaaaaactggttcaggggttattattctaggtaatgaagatataaaacttaaagttattagagatatcaatgataaatcaaattgtatatatgcatactctcctgaagatagaaaaaggtatattctaagtaaattatttattaaaaattctaagtttaggattcgtgatatttgcaatgaactacatgttagtagagctactgttcataaagacttggtagttattcaaaattttttgcaaaactttaaagtgactctagttagaaaaaccaataatggagtatatttagagggaaaagagaaagatattcgaaaagcagtttttgaacttgctactgttaataaaagttatactgaacttaaagaaatattattctcgaactctaatgaatgcaaagataccccatcaacaaaaatatttaaggagctatttaactatgattttgagaaattatctcaaatcactctacacaccttacaagtagaaaaaagtaaccttagtgatgagtattatataaacttcttaatacatatagctatatgtattaagagaatttcaattaaaagatatattaacttatctgaaggtttttttagagaattattagaacatgaatactttgaaaaatcaaaaattttatgtgctaacctaagtgaagcttttgacgtagaatttattgatgaagaggtctgttatatacttcttcatatagaaggattacttaaatcaataaagaaaactactactcttgaacctcttaaaaatgaagaaattacagagtataatctatctgaagcaatagctgttcattggggaagtatactaaatttaaacttaaaggatgatttaatattaataaagtctcttgctaatcaccttaaatcagttctacacagaataaactatggatttactattacaaatcccatattaaatgatataaagagaacatttccttatacttataaggctgctaaagagtctaatactgttatcaaacagttgatgaattatgaagtcaatgatgacgaaataggatatcttgctttatatttaatatcagcaatagatagaagcaaatctcccctaaatactattttaatatgtcactgtagtgatggtgtatctaatttattagtccaaaagttaagttttgaatttaatcagattaatatagttaaatctatacctctatcttctatttcatttacgaactttgatgatgtggacttaatactaaccactgctcctgtagactttgaacataatgctgaactgataaatataaatgctcttttaagtaagaatgatatttccagacttagtacaattataaaaaaactatattctgaaaaaaataaaatattatcttataaataaacaaaaataggcttgtctcaacatagagataaacctatttttcattgtccaaatgataaaaatatatttgatttcatagaaaaagtgcctcatgaactaaaaaattcattttgagacaccttcattttttatatttaatctttttatttaagcttttatattttttaaacttttatattttttaaacttttatatttaaagtaaattttattatttttattgagcgcaagcattatttatattattaatttcttcagtattcttaccaaactttgtagttacaaatcctattgtttttattatgagtaataaggatatcaatgaatatatagatatcataaaattcttacttattattccagatgctactattataaatccatctagcataaataatataactggcaacttcagaaacttaattaccttattaataagcattgcaactaaatcagttccaccagtactacagccccttattattgctatccctatagcagttcctaccaataacccacctatcactcctgctactaatagattgtcagttatgtgagtttgtggtattacttttaagaataatggacccataagagttatatataatgtttttattccaaaacctttccctaaaaataataatcccattactaaaagtggcatagatattcctaatgatatattctcaacaggcattgataagaatgtgctaagtacgactgataatcctgttatccctcctggagctaatgtatgttctgcaaagaaaaaattaactgctaatgccattaaaaatgctgatattgttatcagtaaataatcttttatcatttcttttttcatttaataacctcctatgattatattgtttcagtataaaaaatcaattaaattagtctagcttcctgtagtttttcataaaattaatgcttccttaaaacattaagaaagcatctcttttatcatagtttattatcttattctaaaccaaactttgtagctgcttcatctatagcttttctacaattcttaacacctgctgttataccatctttatccttgaatattgctgaagataatattacaacgtctggattacattctattaatggctccatattgtctgctcttagtccaccatctattgctaattcacacttaggattcttttcgtctatcatttttctagctctttttactaaatcaacagcactctttctccatccccagttatcttttccatcagtttcatcaacaccatgaacgactatttgcaatctatctatatcatatatagcttcatcaacaaaacatagtggtgtgtaacatccaattgttaatcctactttcataccaaattctctacagtaatttattatgtatgcaagaggagcgcctaaaaaatgttctgctggtattatcaacaagttacatcctgctgctgctattttttctataaataatctatcacaatctcttgtgtatatatggcattctattggtttatctgtcactggtcttattgcttctattatttgatgaccacccataagttgcatattttttaagtcatgcatatctgctgcatctgaatgtacgtagtctacacctgcatccattgcttctttaactacggctgatatatgaccgtaatttacatgtgctaatcctgctgctatttttatgtgtttcatatttgtatacctccatattttactttaattagtattaaatattagtttttgatattttttaatccagtattacttttatttagcattacttttattgctgtatatatttcttttatgaacttattctgcttttgttaactgtgaacttattttgctttgtaaattaatattacactgatatattttttttcacaacactttgactactccttaaaagtacctttatattgtggtaaattatagacattaattgtatataaaaagttagttttttaccacattcttatggcatttattgtctatactaactcaattgatatagctagttcatttaatatataatcagactataaatataaatttactcgataaaaagtaccattcataacaatattaatgaaagggagatgtaaaatgagaaactgtattattgcccaatctggaggccctacagctgttatcaatgcttctgcagttggtatttatgaaaaaaatttagaaactaaatactttgataaagtatattttggtatcaatgggattgaaggtatattaaacaaaaatataatagattcagactccttaaacaaagataatgtattaaatttaaagcaaacaccttcgtctggtcttggttcttgtagatacaaactggctgattataaaataaattcttatgattatgatagagttataaatatactagatgaatatgaaatagatacattattttatataggcggaaatgattctatggacacagtgatgaaattttctcaatactgcaaaaacactacttgtaaaataaaatttatagggattcctaaaacaatagataatgatttattaggaactgacaactgtcctggatttggttctgctgcaaagcttatttctacactaataatggaaacatacttagatttttctatatacaaaaataatggtatatttatagtagaaaccatgggtagagatactggatggttagcagcttcttcttcactagctagacttaatgatactccacttgttgatttaatataccttccagaaattgatttctatgaagataagtttatagaagatgttagaaaaatatttaaagaaaaaaataaggcttatatagttgcatcagaaggtataagggataaatacgggaactttatatgcgaacaaaaaacttctgctcatgataaatttggtcattcccaattaggtggagtaagcaactatctaaagaatcttatagtatcatcatcaattacaacaagagtaaaaaccttagaacttggtgtaatacaaagatgtgctatgcatttagcttcagatactgatttaaaacaagcagctgaagttggtgcatatgggatagaactatctaaaaaaggatatacaggagttatggctatcattaatagaacatgcaataatccttataagtatgaagttagtcatactgatatttctaaaatagctaacaagacaaaatattttcctaaagagtggataaatgaagaatgtaattatataactgatgaagccctaaattatctatatccacttattcaaggtaaaccagatatcaaatataaaaatggactaccttatttttcaattatttactaggaaattattataatttgatatacactcaattctatcgctcttaaatacctaagtggctgttaaataaaattataaattgttatatgacagtcacttaatcgtttaattatttaactgtttagttttttaattttttaatcttttttaatactaatacgatttgttgtaataatatctcacacccattttcattttggatagattataattagttagacaataaatattttgtcatgatattattatatatagtgatacaaatagaaatacttttatcatgactagaaaaacaaagattacacaaaggatttaaaaatcaaacaacttcaattaaaataaatggttaaaataacttctaaatcaactacataaacaataaaagaacataaagtagttaaatctacaattataaaattggtaagactataataacttaaataaaattaaagttaacaaagactattaaagttagcaaatattcctctacctaaataattgctttttataaagagttatttattttaatttattttaattgaaatacgattttaactagaacaatagattaatgtaatatttaatataaaataattataataattgaaaaggaagtaatctatgatgaaaatagcagtcataacaaccgaatttttaaaagagtttgtagataattctataaaaaagttaaatattaatgcagaaattgaaatatatatctatagagatttttctcatgttggagatttatatttagaaatagaagataggtttgatggatttgcagttagtggccccatccccaaaaaagctattacaaaaaaggctggaactattaaaaaacctctagttgattaaaaaatagctacgcacacttgtgactttagtcatgagttagtagctaaaatagtcagcatatagggaaacctatatgtagagataggatagaacctatccaatactacttgaattgctggaaacccctaaagctaaccaaactaaaacataaggatgaaataaacctaagtgtgaaagttacgaaagtagaaaaaattggttagatggtataaggttaaatcctaagtactttaaaatgggcaatcagcaggtaagctccgaataggagaaacttcaacgactattcctcttgagggaagtacactacaagctattggtagtggaagtgggtagaccttaacggataatgccgaaggataagatatagtctgtgcttacatgaaagtgtaagaagttcataagagaactgcataggtagtagcgaacttatgtgaacgacaacctcaaaaatgataaaagttaagaatttacggttcttatatatgttatttaaaaataaatataaaaaaccttcaaaatacttgttttaagtaattgcatattttaatattatgataggtgatgaaaaatggaagttactcatggtagaggatatgcatataatatgtcaaatatagatctccagtattatggggagacatttttggaatcctagttatttcgttgctactgtatcagaaaatacagaggagcagataagaaaatatattaataatcagaaaaaacaagtaaagtgaggtgatagtagtggaaaaagcttataagtttagaatgtatccaaataaaaaacagcaagagttaattaacaaaacttttggatgttgtagatttgtatataataagtatcttgctaaaagaatagaagtttataaaaacgataaagaaacttttacttataaacagtgtagttctgatttaaccaatttaaaaaaagaattaaagtggcttaaggaacctgacaaattttcactacaaaacgccttaagagatttagataatgcatataaaaaattctttaaagaaaaagtaggatttcctaaatttaaatcaaagaaaattaatagattttcatataaaactaactttacaaatggaaacattatgtattgtggtcaacatataaaactacctaaacttggtatggttaaggtaagggataaacaagtacctaaaggtagaatacttaatgctactatatctaaagaaccaagtggtagatattatgtatcattatgctgtactgatgtagatattggagtatttgaaaatactaataatcagataggtttagatttaggaattaaagaattttgtatctcaagttgtggagaatttatagaaaatcctaagtatcttaagaagtcattaaacaaacttgctaaattacaaagagaattatcgagaaaaacaatcggtagtttaaatagaaataaagcaagattaaaagttgcgagacttcaagaacatatagctaatcaaagaaatgattttctacaaaaattatctactaaattaataaaagagaatgatattatttgcatagaagatttacaagtaaagaatatgattaaaaatcgtagactatctcgcttaatttctgatgtatcatggtcagagtttattcgtcaattagaatacaaggctaattggcatggtagaaaaattgtaaaagtaggtaaattctttgcaagttcacaaatatgcaataaatgtgggtataaaaacgaggaagtgaaggacttaaatataagagaatggatttgtcctagttgtaatgaaactcacgatagagatataaatgcaagtataaatatattaaaagaaggattaagactaataacaattcaaaataaataacttatgtaagaaccgtaggaactacggggatggcctgtgaagaattagtaagacatattttagtatgcaaaattctatgaagcaggaaccctgtgactttagtcatgggaggttcagtttggtactgacttacaaagttactatgatatgtttctaaagcttatctttaaatataatacattagatttttctagagcatactttgacttaacagactgggcagataatccaaaagatatatcatattatttatcaaatggcacatttggagacttaatggatagtattgatgaaaatgcatctaaaatgagtttatctgacatagcaaaacttgaaaaaaagattgcaaaaaaacatattaatctatggaatgaagggaaaatcgatttttctactactcgttttagtagtattgttcctatgttacaaaatgcaggagtaaactttcatttcatataccctgatatagatttattaaaaaatacttttaataacttaataaaagatattcatttacatagaatgaagggaaatcaaccaagtgtaatatatataacagttaaagatacaaattatgatgactctactctagaccaagtttataaaatattaaatagtattaaaaaagataaattaaccgattttataattgaaaaaaatagtaattcttttaaaattttcactaaatgtgaaacgattaaatcattaactaaaaattttactgcatgttatataaaagaatctattgaaaatagtacaaatattaaagtatgtgttggatatggaattggtaatgatataaagcaagctatgtctagtgccataagtgctaataaggaatctaaaataaatcctttaaattacagtttcttagtcaacgaaaattatgagacaataggacctttactgtgtgataagttacttactgtttcaaataaagtaactccacatataaatacaattgccaaaagttctaaattgtctactcttactattcaaaagattatatctgttactgaaattctacaaagagatgaagttactcctaaggaattatcttcatgtttaaatgtaacagttagaactgctaatagatttctaagtagtctcttaaagtctggaaacgctactatattatatgaaaaacaaaactcaacaaaaggtagacctgaaagggtatacaaattatttatatcagaaaataaatattaaaatccaaaatgcataaaaatattttatcatctaatattaagtaaaattatatatgactttctaaaaggtatatctttgcatctttttaagatataccttttatgatatttaataatattttatgttattatctactaaaattattttctaaccattttactgcacaatgagcaaataaagctgaaccataaactaatccctcttcattaaaaattgctttaggattatgcataccaaaattatatccctgactaatacttcccattccaatccataaaaatactcctggaacccttagtaaaatctctgaaaaatcttctgaacccattgcagatggaaagtctattacattctcatttcctataatttctttaacataagatacaatctcatctcctacatccaaatcatttataactgcgggagtccccattttaaattccactttagcatttcctccaaatgatttagctattcctgtagatatttcaataattctattttttaatttttctctaacaaattggtcaaatgttcttaaagttcctgacatagatgctttatttggtatagcatttggtacgtttcctgcattaaacataccaatagttaaaactacaggctctttctgaggtttttctcttgaaagtatagtgtttaatgctatttgtatatgcgacattatgtttattgggtccactccaaattcagggcttgctccatgagttgcttttccttctactgttatttcaaatatatccgcagatgccatagctggaccacgtgaataagctacttgacctgtgttaagaaatttacccaccatactgtgaaatgccatagctgcatcgacctgaggattttctaatataccatcatcaatcattgattttgcacctctggtactctcttcatctggttcaaatacaaactttactctacctttaagtaagtgcttattatccataagtattttagctgctcctaagagcattgctgtgtgattatcgtgtccacaactatgagatgcatctttattcttacttttaaaaggtaaatccgtctcctccataataggaagtgcatccatatctgcccttaataataaggtctttccaccattttcactgtctaaaacagctactattccattattagacgtcaatttcggagaatatcccattttttctaaagtactggtaacaaaggttactgttttcggtagattgcaaccaatttcgggattttcatgtaaatatcttctccatctaataatttccccttctattgactgcgcttctttaaaaaaatttttcatattccttcctcctaatcagatagtcagcaaaatctcactttcttttagtaatgaaatgatgctgatataaaaattataattttatatattaaacttcatgtctttttaaggagttggaatatcatctggaataggacatttatatgttttaccattcatagatttatcaaactcttcttttgcctttttagctatctctggattatttaatattttggctccaaacatagccatgatttttgatgcatatatcatacctttttctcctatagaacttcctgcacaagatgtaaactgccagctatgacctggtgcacctagattcgtacaccctgtaaaaaagtatgctgtcggaactatatgcattacatctccaatatcagtagaaccataactattaaagtttgtaacatttcctccaccataatatagatgagttccttctggcaaattatatttacttatcatagccttatattgttgtgggctttgtctatctaattcagctgcaaaatccaattcctctcgagtccaaggctcttgtttaatctcattcatacattctgatacaagatttgctaaaacatgattatttaaagtattataacaacctcctaaaaactctacttcaacttcagtttcagtcatcattgcagctccttttgctacctttacaagtctttcatatgtactttctacagcttctctacttaaagctcttgtataataccatactgatgctttatcaggaactatgttgggtgctactcctccatctgtaattgtataatgaatccttacatcagaagtaacatgttctctcaaataattagctcccacattagtaagttccacagcatctagtgcacttcttccattttgagggtctgagcctgcatgtgcagtctttcccttaaagtgaaattttacagagttaacagctgttgaagtaccaattgtagcttcactaattttatttggatgaaaatttatagctaagtctaacccttcaaatgctccacctctagccataaatcctttacctgttaattgttcttctcctggacatgcataaaatactatagtcccacttaagttattttctagcatctctcttttaagtcctactactgcccctacatgtgctgtacataataaattatgcccacatccatgaccatatgcactcaattcaaatgcttcttgctttgttgaaactttttgatttaaaccaggtaatgcatcaaattctcccataaaacctataactggtttacctgaaccaaaactagctctaatagccgtggctaaacctcctacacctacttccacatcaaatccttcacttcttagaaagtttgctgtattttcacatgctttaaattctttaaatgctttttctgggttttcccatattttcttacttaaatcatcaagtttgaatctttttttatctatctcatttatagatatacttcctatcatttcttattcctcctataagtatatttactatcaaccaaatataattggacctattatactagcaaatgccactgatgcaatggttacagtaacaaatcctcctataatcatctttggtaataaataatctgttgccctttgtttttcttcttcagttccttccatagcatcaataccttcgttggaaattatctgtgttgcaggataagctagcatacaagttacaccaattgcagctgacattcttggagaatatcccaatagttttcctacaattgcagtaaataatattataaatacagaacctacaacaagtattcctatagttggaacaatcatcccaaacaatgctgttggagttaccttagcaagtcctccaggtaacatcaacatacaaccaaacattataattccattagattgagatttatctaaaattcctttttctaaaaaacctattcgtgtaaaaatcaaccctactaacaaacatgctatattaggatttaaataatagtttgcaggggtaaatcctggtattaaagtagccaatcctacaaaattaccaatcatagcaacaaatgaaagctttgcaagatacactagagtagatgattttttacctaaatcttctttaaaaattctcatacttggaagtctaaaattactttttgactcatctttcaaaaaatccccgttatctcttttaaattttaattctttatttatacaatatgtagttatcggaatgccaaagaacttttgaaatgataatactagaattacaaatgcagcaagttcaggtctatttgcagcttctgcaacagttgttacgataataccggcaacagtagaacctgctattggaggtgctgctattaaagcatactctctaccaaataacatactacccactgttaaacagccaacccctattcctacaatacctactaatgcaattacaaccgttttccattcatgacataagtcttcaagatttataagtgttcctaagttagttattaataaagctataccaaagttgctcattgcagctaatatccctgatgctcctgtaatgtcttttggtaaaacatttgtccaaaatcctagtaaaaatataatacatacaaataacaatgttgaaattgcaccttttgttttcttagataaaaactcactaaaagcataaatcattacacatacagtaaagcaagtaagtggattccaaaaattttccattgttgtttcctcctaaatataataattttttatcaataaaacaataattataaaatgtatattatgcagttattcttaactacatatggtatagcttgatattttttgatgatattatatacgtcttaaattattcctaaaatatctaaataaatataactagagttaactctctaaatattaactataattatcaacttactagatttctttttgatttttactttctacataattttacaagttagaattgtacttcaactactttctatcttagtatacatgttggaagacttatatttatttaaatattagatatagaatacatttttacaaacgtcttaaattattcttaaaatatctaaaacgaaataataatataaccattaaaccaatattatcagaatatactccactttaagtcttctttatataaaaattttatctactagtgcatcccctcctttgtaaattagactatttctaagcgaatttagatatcttattcctatgaactattactagaaacaaaaattatttattatattaaatcaatgataagcatactttaaaattctttctatacaagtatgatttatcatataatgacatctataccttcatctttatagtagtcctaaattattcttaaattgacaataaaaataatttcactatttgtaaaaatacttgtttttatattgtcaaactattctcaatatagattataatttcaaatcttttttttgtcaatatattctgacatttttctagaaaatttataaagttatatagtgagtaaatcatactatttttatataatgagtaaattatactatgaatatgtctaaatatttacttaagtataaacataaaaaatgtgtattctcctttttatagtaattttagttgccattacttttaataagaatacacactttactttaaagaccctatactctattttaaatgctttactagacactaattaacattagttcctaacttctatttatcttattactaccctactactatatccgtagaaaaatctaaaacttctccattagattttattacttctttgtaccaatcaaatgattttttcttatatctcttaaaacttcctttgccttcatcatctaagtcaacatatataaatccatatctcttactcatctgacctgtagttgcactgactaaatcaattggtccccacatcaaatatccaaaacattcaacattatcctcttcaattgcagacttcatttgagatagatgcttacttaaatattcaattctataatcatcatttatagttccatcttcttcgattttatcatatgcccctaaaccattttctgtaattaagataggtaattgatactttctgtaaatatagttcaaggtaaatcttaaacctatagggtctattgcccatccccacttactttgttccaaatatggattttgaatcccaccaaataaagatttatcacctgataaattttcttttggagtagatacacttgaaaaataataattaagacctataaaatctaacttaccttctttaaatgcttttttgtcttcatcagtcacttcaatagttatattatttttttcatattcttttaatttatattggggaaacttcccattgcacattgcatcaatttgataataatcacgatcattatctaaaaatgcatttaacacattactaggattacaattgtatggataaattggatttagtccaaatacacatccaactttattgttgggattgatttctctagccaactttgcaacctttacacccgccaaagtcatattataccctacatttgccaatgtttgaaccttattttctatttcactatacttaatacctgctatcatataagtaaaaatatccgagtgctctgtttgagggtcaatatggttcatctcattaaatgtaatccagtactttactttatcatcaaaccttcttattacagtctcactgtactttaaatacaaatccataagttttctgttattccatgaaccatatttatgtactaaattcataggtaattcaaaatgatatagtgttacaataggttctatattattttctattaatgtatctatcagaccttcatagtatttaatccctaattcattaggattttcatcatctccatttggaaaaattcttgaccaatctatagatattcttaatgcactaaatcccatttctttaaataaagctatatcttctttatatctattataaaaatctattccattatgagatggataatccaatttttcttctattttatcagtaattactcttggcgtttcataagagcccttagttacaaaatccataattgcaggtcctttgttatcactatcccatgaaccttcacattgatgggctgcaatacttcctccccagaaaaatgtatctttaatattcatgaattttccctcctaaaatttatactattacagttaataattcttctgattcatcatttgatgagattacatctaaataatcgctagtatttgtaactacagttattatagtagaatcaaagccttcctctataattttatcagattcaaatactgctaaagcatctccttttttaaccctttgattttgtgttacaagactttcaaagaattttccatctaagtttacagtatctataccaatatgaattaatatttctaatccttcatcagtcactataccatatgcatgtttagttggaaatactatagttatagttccatctacaggagatataacagttgattttgattcactaggtataactccaacccctttacctaatgctccagaggaaaatgctttgtcattaacttccccaagtgcaattacctgaccttttgcaacatttccaatactaatagttcttgaattgttctcgttgattattagttctaattctttttcattatcacccttaacttcttctttttcatctgaaggtattcctagtaaataggaagctgctgttgctgctacaaatgatactactacacttattatcataaatgtaaagttagatgcctctcctccaacaagatatgttggtaatgcagctaatccccaaaccattccatatgttttaacttgagctaaacctgctattaaaccacctatacctccacctatcattactgctacaaatggtcttctatatttcataaacacaccaaacactgaaggctctgtaactcccataagtgcactaaaacttactgtcccaaataattgtttttgttctttattcctagtttttaagaaatatccaaacattgcaccacaaactgcaatatcagatattgttgcagcgcccataaaaattgggtcataccccaatgttgtcacagaatttaaagatataggcatagtaaagtttgctgcaccaaaaactattaagagtggttgtaaagctgcatacagtgcaacaacactccaattacccaatgtatcaattaaaaacatacatgcatagtttaatccatcaccaatccacataccaataggtccaaatacagttaatgtaactgatagggttattattaaagataacactggaactaaaaaatagtgtagtgctttaggtaatatttttttcaaaccttcaattataattcccattgcccatactcctaaaagtattggaataaaactgtttgcataagttgtagcctgtaaatttataccaaataaacttaatccttctacaccatctattgatgacgataataacgtaactgctaacactactgctatatagggatttacattaagtctttttgctgatgctattgcaattaatactggtaagaagtgaaatgtagcacttcttaatgtatctaatatttgatatgtagggctatcactctgaagtatgccagacatatttaaaagtgctaatatacttgcgagtataccagctgcaagtagtacttcaattactgaagtcatagtctctgagactaccacaaagatggaattaaatatacctttgatacctctaattcccttttttctttcactttttatacttgattcacttgaacttaaacctatcatagacataaactcgttatatacatctacaacatgagtacctattataatttgataagcaacatcattagaaactacatcaattactccttttaattttttaatttcttctgtttgagcgatacttctatcatttaaagtaagtcttaaacgagtaacacaatgcgctaccgactttatattttcttttccccctataagttttattatattttcatttaaatctttatatttcatctgattttgcctccagtctttgagtcaccctatttatatgcaacattaaataagtttcttcacttatagatatatcgacattaaattgtgattttatatattttcttatcttttgaacacttccaaatgactttggataaagttgacttacttgtttatataaatctatagaattatcttcatctattgaagcttcatctgacataattctttggataaagtactgtagatgagtagtaaatctcatataatttgttgaagtttcatctagctctacattaaaatgatattttattatagaaactatatctgctaaagttctcaactctacaattgtactatcatgagactctttatttacctccatatttacaaaatgaagtgctattgatactgcctcatcatcaggaagattaattcccttactatcaccaattaattttagtgcatgcattccaatttcaaaatgctttggataaaatcttttaacattccataccaaaggactttttataaattgattcttttcacatcttttaagtaaaaactctaaatggtctagtaaggttaagcttagataatcacttgactttatatttaaagctttctcaccatattcaattatttcattaataagaactatattattggagtctgagttttgtagtagataactaaagtgttctagcatatcgtatgaatctagtatatatgttctctctatttcattttcatttattacttgtcccactctttttttaaagccaattcctttaacaaatacaataatttcatttttacctctttttactaaggctacattattatttaaaatctgaattattttcatatattcctcctttcaataaaaagaactcaagcatatatgtatagagtatccctctatttttcacatatatacttgagttctgcctgctaatcagtaacatactcaaaattatgactacgtcgccataattaaaattcttttttgtttaatttcatattctatatgttatactatccatataaatctgtcaacggtttcctagatatttttttattctataactacaagctctgttatgcgattatctggcaaagtttatatactaaattgatactattttactgtcactaatatttacaatattgtctgaaccattatctattttactattatgaattatcatagtaatgattttaaatataatgaactgtatgttaataaataaattcttaagtttagttttatttaatcactattaagatatattaataggtaaagcttcaaatttagttttatttaaatgctattaagatatactaatatataaatacttaaatttagttttatttaaacactagtaagatatactaatatataaatacttaaatttaattttatttaaacactagtaagatatactaatatataaatacttaaatttaattttgtttaaacactagtaagatatactaatatataaatacttaaatttagttttatttaaacactctagtgatatttttaaataaattttaataaaaatcattctattttgtcataaatcatttatctggcttatatttaagatatattggtggatactttacactttttaattcctcattacttcttaaaagtttattattattttccacatcataaatttgtaacattactttatttacatatagagcatgataattatcactataaaaatattgatactcatatcgagggtcatctttgtaatacactttgtatagtattccttcgtaacttgccttcttggctttttcttttgtaatactttttatattatcttttgaaatatcttgttttaccatatacttatcaatatatgtttcagcatctttccatggtttaatgcagtttttatatacaacaaaccctgttacacttataatacctataattaatactataaaaataactttatattttttcatattaatcctccttcatttattatttaaaacttgatataacgcactaaaaaaaggatgttatcttttttattaaaatataacatccctcatatttagcatcaatatatatgccccaactggtaggttaaaagaccccactgtcagtactttgattaaattgcatgtatgtatatatatttttaacaaatctattatatgtcaacttgtctactattacatataatctgtaatattacatctgctgctttttttgagcctcctgcattataaaagctttttgatagtttagttgcattttctttatattcattgtcatttataacttgaaatactgcttttttaatactttcggacttatcctcttttaacataattcctgctcccaaatgaacaactctcttagctaccattctctgctccgaatgttgaggaaataataccatgggtactccataatataaactttcattaacactattcatcccagaatgagtaataaacacatcagttttttgaagtatagcaatctgttcaacactatttttaacctcaaaattatttggtatatttcctaaacttttaatatcagtacttctaccaacagacataatcacatcaacatcagaatctttaaatgcatttatacagtttttataaaagctaacatttttattattaattgtaccaagcgaaatatatattaactttctttttctctctttaggtttaataatcaactttgatactgatggacctacaaatgaatacttactagagaaggtttctaccattggttgaaattcttttgatgtatatacaatggtatccgtatcattatcattagaaactatagaaataaaattttttacttcatacccttttctttgtaaaagctttatttttttattaatgcgtcttacaccaaaaatcatacgtataatttctataaagttttgtttcatcaactttgctgtatgtttattaaatgcaaaagttgttgtagagcatacatatggaatattaagtttttgtgcaaataactttccccaaaaacttaatgaatctgatacaatgcaatctggattaaaatctttaagttccctacaaactttttcatctaaagaaatagtagtatctactatcatctcaattaatccaggaaaatccttaccaatttttttctcatctccagggagtaattctggaaggtatttatcacaacaaataaattttgctccagcaccttcaattttatctttaaattcattaaaagaataatacaatacctcatttcctctatccactaattcacgaactacttcaatagtaggattagtatgaccatatgcaagaatgctaaaaaatactattttactcacatttcatacctccttttataattttttaaaatcattcttctttacgtactactcccatatgacctataaaatttatcaaatcacgttgatgaacaattcctaatcctctttcctcatctccaagtaccaataatttatctcctgcatttatattaaatacttctcttgcttcttttggaatgacaatctgaccacgttcaccaactactactgctccaaagaaaaactttcctttaggaggtactataatacctgttttttcttccgaatgattaactaagtcatctagtttgaccttgtacaattttgcaagtttaatgcaactacctatatcaggaatagattctccagtttcccttagttaaagatatgaaccctctttatcagtctacttttccaataaatcggtaatatatctctatttcctgtattctttcgttatcctcattcgttattgcttcatgaataaggattttttctatcattgcatttaataacggtgctgtcagttcctttggtacggaatactccttgattaactcaatccacttttcagcacctatcatatcctgttccattttacttaattcttctcttaggttggttatctgctgttccagttctatttgttctttttggtacttgctagacaacatcacaaaatttcgctctgttatcttctcacaggctctatcttcatacattttcgcaaacaaacggtcaatttcattttgtcggttctcggctttcttaaaggcacttgcctttttcttcttttcccgtattcgctctgcattgcctgctttctgtatcttgttcagcaccttttcttcgtcctgctgtactgccttagcccaatactgcaatcgtttcaatacggcttgatacaacacatcataacggatatagtgcatagaacaagtacctttgccaaactgcccgtagtaactgcaagcataataactgtaaggcgttttatttgccgtattcgttgcaaaccgcatagaccagccacaatccgcacacttgacaagccctgcaaatatcggtgttgctttttcctttgtctgtctacgtcttgattttatctgttcctgcacacgatagaacacttctttgtcaataatcggttcatgggtattttccactcgaaaccattcactttcgggcttacgcactttcttcttgctcttgaatgaaaccgtagactgcatattgtgaacgctgttgcctatataaacctcactttttaagattgccttgacatgagcaatcgtccactcataacgtttgctttcgggctttccctcaaagatatgtgcaaaagtaccgtaccttgtaaaattcagccaagacgctgtcggaactttttcctctcgcagtacctttgtgattttggcactaccataaccttgataggctagggaaaagattttttcaacaatccattttgtttcatcatcaaccagcagttttcctttgatgtcagggtgtttcttatatcctaatggagcataagcaccataatgagcaccctctgcaaatttcgtcttaaatgccgatttcactttacggcttgtatctcttgccacccattcattgatgatgttcttaaatggtgcaatctcactttcgcctttctcgctgtctacaccgtcgtcaatcgctatgtaacggacattatggctgggaaaatacaattctgtatattgtcctgtcataatatagttcctgccaagtcgggaaaggtctttcgttacaacacagttgatttttcctgcctctatatcctcaatcattctttgaaaactcggtctttcaaaatttgttcccgaccagccgtcatcaatatattcatcaatcacattcaaatgatgttcttttgcatatagacgcaacatacttctttgtgtggtaatgctggaactttcgccctgtaattcatcatctcggcttaacctaagataaagtgcagtattgtaaatctgttgtttcattgtcagttatcctcctttataactaacccgtgtttacaatacctgcttgcaagtaaagtataacacgggtactttttgccattcaatctatgtcttacaactgcaccaattttatgcgattgtctgctttgctttttccagcataacatcagtcagaagttcctccattgtctttcccttttcggaaaaatgctcttttacaacaatctttgtttttcctctgttgccaatgctacgcttattatttgtcttttcttgcattgtttttacaatatcagcaataacacataccccctttccataatcttttttctaagcaattcaacggcatttgtcatagcccacaggaattccacctctgcatagttcttatgtagccgtacccattgcgtgcgacgctctgaacgttcaagctgtggctgtacgggagtatcatttatcagacagaacaggtcatggcgataaaagaggacaagtcttttacaggaacacaaatagggttcgctcgcttttgcagggaaaaggtcatggcgtatctgcttcaatggatcgctgtctgtcaaacgtattgaattgctttattcagttgtcaaagaacatgaaagaagaaaatcgtctttcctatataccgcgttggaaaagagccgaagcgtaaccaatattcaaaactttttctcttttcactacatatctgtacagcaaacgtccagttgctaagttgaaatgaaaatagttaaactctcttttcctgcaccatatagggaaagcaagtatcagtttgctaagttggtgatgaaaaaaatctgtttttcttttcacaccctaactacccatgcaacaccgtaactgccaactatggaataaaagattttctttgctccatatagggaatgaaaactgtcaaatgttaagttgaaattaaaaatcgtttcttctttcacatcatatagggacagcagccaccgatttaatgacctgttttcaaaaaaagttagatttcctttcctcgcaccatatctgtacacaagcagtcattttgttgcagtttttttgaagaaattaaaaaataccgtcattcccttgtggaacagcggtatctttctcaatcatatctgctatgtctgttgtcatttgtttaatctttaattactgcttttctgttagccttgtatgcctgtcgatttcttccagataatttgctcctgttttcttttcaatctcttttatcatcaataaagagggcatgacctgtctttctagccagcgttttattttatccatattaacagcaacaggtgtcataataaacggaagtgaggtcgttacattatctaaaaatatatcccataaaatataatcgggaaaatctatctgtgtgagaataaagcttgctatggtctgttcgggatttcttgaaaaaacaagttgctctaccgtttgtcctgcttttccattttttaaacgaatttcgaagcggttcttaatatctgtttttatacccttgcttttttgttccttttctttttcatacaagcaaaagtagatagaactattctttgaaccgatataaaaagtttttgcagtatctccatgtgtacccgataattttccgctgtctactgcttcatgggttcttgaacgtttccataccttgttagcataataacgttcccttagaatttctatatccagcaatccgcccatatcattgactgctaaatctatgcgtttaaaaacaccttgataatctatacaacatcttaaaaagcaataccagtctatccctcttacctgtaaaacatattctaagtcccgacaccccatacctcttaattccaataaaacacccatagaactatctttagaagcatttacactaatatccccatagatatactgttcttcataagcatacattccgtaatcttcatgtataaaatattcgcttttcattgccagcacattttttataatttccaatgcgtctgtggtaggaaaacgaacacgcagatagtcaatcgttaaagtgaaaggctgtgtacaattacaataatcaagataatgtaagagtatatgtttcatttctttactggcttttgtttttccgttttcaatttcatttaagttctgcctgttgatttgtagttcctgtgccagtcgtgattgcgaataatcacagacatttctcttttgctttaatgtttcaataaatttcatatcattcatgcttcattcctccaatcaaaaaaaggcatatactcataggagcatacaccttgtatcttatatttattttctattgatatgctgttttagacctgtcgggtagaaagaatagggtgtaaagtgaaataagttcttacaaccttataaatcgttgcatatcagcagttttatatttgtttttgctcttgtcttttgtaatagtccccccctgttagataacgggggcttagaaagctcgcaggctcgccaaaccgccaaagtgaaccgccacctcgccagcaagctggcgtggcgatatgtcttacgaccgccaccgctggcggatcgcttcggcggttcgtgaaatttatattctatctataataatcttaaaatctgcctaaccaaaatgaaatggaactaacatattaagtataacagcaataacaactgcactcaatatcatatacgttgtctccctaaaggtgttacgttttaaagctattaatgcacaaccaaagactatcacttctaaaattgaatacacatcaaaataaatccaaccataaataaatgtaaaattaaataaaattgcaattattattactgaaagtataaaagatattttgcttttccccttagcataccaacaaataaaagctaacaatggagaaatgacagtaaaaccaagccaaatcattgcataattttttggaaaaaatccagcaacaaaatacgaatataggtaataacttgaaaccattccaatgaaaaatactaacacatttaatgatgctcttatggaagaatgactataaattgcaatgtacaaagcaatcaataaccatatagcaaaacgaccaaaaaaattactaatatctaaatattcaaatataaatggtaaagtattgcttgctgtagtatctaaaaattttgcaaaagttcctaaaactattccaaaacacagtataaatattgtatttataattttcctagtaatagatatttcattatctatacgccttatctgactcaaaaacttattcataatgcacctctaaattcaattttccctatcaaatgttaaatatcttgtgccttggaatgtcagctgtcctttatctccctctgcaagcactccatactctgagccagatacagacagctctattctatcaccactatctacttgaaatgtcacataatacgaggtgctggaaattgtatgaaatccatgtgctcctgatatatcaccagcgtttggttgattgttatgagtggtattctgacgttttgctactattcttgctgacacagttaagcgaggagaattattgtttttaaaccaagtagctattcctttcacaaaagtgaaaacaattattataaaaatcagtataaacattataggaaataacatttctattagattaaacaatctctttttcctccttaatgaaattctcctttaagtataccatgctcctttaagtattgtcatttcttttcttcatttaaaaagttacttatcagtctaaaataattaggaaaatgaaataatttactgtgttgcattaacgaaaaagagataccaacacatttatgtagtatctctggcttaatagcaatattcttttctctacaagcaggtaaacacaggttatttcagtaatatccttttgtttgggaaactccactttcccattttgctattgattgtctagaaacattaagtttttcagctaattcttcttgtgtatactggtggatttttcttagactttttaaattctcattaatcatatttttcatacctcctatgtttataatattggatttattatttaaattctatcaactaatcttaacattcatatatatatttatatacttttattatataaatttattgttcaggtaacatgtttccttaagttataatagataaaagcaaacacaaatctgtcaaccttcgctaaagtatttaagttagggtcatttacattgttaaatacttctacatcttaaaaagttttactcatcaatcaaatgaaaacttgcaataagaattaaaatcataataacaaaagtgctgtctcaaaataaagataatcttttttcattgttgaaatgataaaaatatatttaatttcatgtaaaaaagtgtctcatgaactaaaaagttcattttgagacactccttttttataataaaacaatactatctacgtctttttaactatatatctagcgcagcatgatgcccttggtatactgcatttgttattgtagatgcacgaacacagtctccaatttgagcaacatatggagcagaatcaagtaaagtgtctaccacttctcttcttggtttttgtccaagtgcacatattactgaggttcctggaatatttattttattcccagatttattcatacatactacaccttctgttgttacacttaaacccttatgttctgtatatacatatataccttgtctttctatttcttctaataatattggacgatgccttatatttgcatctggggcaagttctgctctcatctctactaagtgaacagtcttctcttcttgagctaagtgaattgcagcctcacatcctgctaatcctccacctaaaactattacttcgtcagtgactttttctttttctacgtaataatcattaactattactacattttctccatcaagaccctctattggtggaacaagaggttcagaccctactgctataattaatgcatcgacattttcattttcaacatattcttttgtaactgttgtatttaaacgtacttcaacacctaaatcttttgctatttttccaaaagtatttcctaattcatacattttatacttaaatggaagtgcttgttctccctttaaaattccacctaattcattagttttttcacaaagtattactttatgtccacgctttacagctgtaatggctgcttgcaatcctcctggtccaccacctgctattaatacttttttaggttttaatactgaaacaacttcagttccatctaattcacgtccaataagtggattaacagtgcagcgtcttgtagaagtggtagcacgttctgccatacaagtgaagcatcttaggcatttcactattttttcatcttgattactcataacttttcttggtaattcgtggtcagctagtaatgcacgagccatgtaaataacatctgcttttccactagcaattatctcttccatcatttctgggtcatttaatgctcctatagtagcaactggaatatttacatgttttttaatttcttctgcaagatatacgttacatccatgttctaagaacatagaaggatgtgttactgcaaaccctctttggtatgtacctgctgatacatgaagtaaatctactcttgattccaataatttagcaatttctgttccataatctaaatcataccctccctcaaataattcagaaccactcatcctaaactctattggaaatcctggacctactgctttacgaacactatctaaaacttctttagcaaaacgaactctgttttctaaagaaccaccatatttgtcagttcttttattaaagtaaggtgataagaattgattgattagccagccatgtccaccatgaatcataatcatctcaaaccctgctctcttagccaatgctgcaacatttccatatgactctactatttcagcaattatttcttctgtaagttcttttatctctaatccatcaggacgaacactaggacttactccccattgtgataatcctcgcttcttatctttgtcaactaaataagttcctgaatattgtcctgaatgagatagttctacacttggtattgctccatgacggcgaattgcatctgctgtataagtaaaacttgctaaggaatcaactatttttaagtctagatgatatgcatgtgaaccatctgtttctggatgaaccatacattcactaattgtaactgcacctgctccaccttttgctcttaattcgtaaaaggctgttgattttgagccaattgtacaatctgctgttatgtctgttccccccataggtgctgaaaacattctgtttttgaatgttacatttccaattttaattggcttacatagatttggatattttctttccattttttatatctccctttattaaattttctatctttaaattttgtattttatttatatatttatataaaaatgttaatataaaacctattaaagctataattatagctataatgaaagccctttgataattgccatctacagaatatacatttttcatcactgcaggtccaatatatcctgcaaaagcaaaaccaataaacatgattccataatttacactattatttttaggtccaaatttatctactgtaaatcctgggaaaattcccataaatgaaccaaaacatatacctataattattattccaatatagaatgttgctacatctccttctcttgagaataacaaacataataaaccaaaaattgaaataactaatgcacctgataaagtatttattctaccaattttatctgatatatatcctgcaacaatacggcctaatgtattaaacaaggctaaaattgaaaccactattgctgaatctgaacttgtcatcccaatcatatttgttgctagagaagatgctaatgacacacacattaatccatagaaagctccacaagttaatattataatcattagataaaatataggtgttgaaagcatttctttccaatttttattaataacaactcttacttttccttttttctctggtggtacccatccttctggtgtgaaatctgctggacattttttgataaagaaagaagaaacacatacaattataagaaatactaaacctattgatttaaatgcagaagttactccatatttattaattatccaattagcaactggaggcattattactgaactaaacccataagctgctgttgttataccaccaactaatccacttttatctggaaaaaatttaattgaattacttattgtacatccataaaccatgccaaccccaagacctgttattatcccatatgataaaatcaacataggcaatccttttgagaaacctgccaatatcatacctataccaaaaattaatcctcctacaaatacaacttttttaggaccaaatttatcatttatcattccccctgtaatcatagtaataggtccaactgagtttgtaactgtaaatacaattgctaaactagcagctgtaaaagttgttccagcaagactatttaaatgttctgccataggtgatgcaaatacactccacgcatatattgaaccaatacataaattgatgaaacaacttgcaattaatataatccatcttttttgtgttaaattcattactctcctcctcgataaatttattaaatagaatttcttagttaagattatcacaattttttctatatgtaaatataaacatgtaaatacttacatgtttatatttacataatttcatttttatatatagttttatttattttttgttcctcataatttaaaagttcttattaaaacatagctatattaattaattcaaactaaatatatcgtgttataataagtatgtaattaaagaaagaggtgtatttatgcgaactttaaagtatgcaattttaggattattaaatagaaatcctatgactggttatgatatcgtaaaggagttcaattttcaattagctgagttttggaatgcaaagcatagtcaaatatatcctgaactaaaaaaattggtaaatgaaaagcttattgtatatgatattaaaattagtggtgatgtattagagaaaaagttatacacaatcacagaaaaaggtaaagatgagttcttgaaatggcttgaaaaggatgagccaatggaaagaacccctaaggatatttttcgtcttagaatgtatttttctaataatttagatatagatactaggcttattttactagagcatcaattgcttcaacaccaagaaagaattacgttcttgtacagtcaaatggagcgttatagtgaagttcctcctcttgatagtaatgattttggtgattatatagttcttgatggagctattatcagggaacaaggtgctataaaatggctaacaaattgtattaaccatcataaaaatttggataatactactttgaaataataacttattgattttaatagtgtatttaattatagacattaaatttataaaaaagactgtacacaactttgtctttgtatacagtcttctatggttgattattcaagatagataattataatatttaaaacagttaatataaaagttaaatattttttattaagctatcaattttatcttcttattgcccttcaaaatcatctttatatttacaatctttcacatgaaaattactatctcttcttatataaaaatccagttgatattttgttactaaatttaatggtaatcaaattctttaccaatgaatataaaaattactaatgtgttataattttcttaactactaaattttacatacatttgaatagaatatttcaataaagtactataataaataaaaaattaagagttaaaataaaaaatagttagggagatattattatgattttatattttagcggtactggtaatagccgatatgtggctcgtaaaattgcacaagaattaaatgatgaactgatatcactaaatcaacttataaaagaggaaaaaacagatgaattaatatcagcaggtaaaccattcatattcgtatgtcctacttatgcatggagattgccaatagtggttacagattttataaaagaaacaaaatttctaggagacaacagagtttactttgtaatgacttgtgggggagatacagcaaaatccataaactatattcaaaaactatgtaaatacaaggaatggcaattaaaaggtatggcagaaattaaaatgccagagaattatatagctttattttctacaacagacaaagaaacatcaaaacaaatgattaaagaagcagataaacaaatatataggattatttctgatatacgcaatgaaaatgaatttgaaactattactcctagtggcttaggaggtacaattaaaagtggtataataaatacagttttttataagacaattattagtgccaaaggatttcattatactgataaatgcattggctgtggaaaatgtgtagagctatgtcctttaaataatattaatttaaaaaacaaaaagccagtttggaaaaatagctgtactcattgtatggcatgtatttgtggttgccccactgaagctattgagtataaaaataaaactcaaaacagagaaagatactatttagaataatatattcttaatatttaaaccattataaaatgaactatacccattgttttatacagttttacatattttaactgtctcctaagatgggtatagttcaaaagatagtgtctcaaagtgaactttttagttcctaaatcaatctttttgtattaaatcaagtataatttaatcaccttttcttatatcattttcactaatatgttgtattccaacaaatataagatttattagctctgttagtgacttccattgtgatttttttgaatcaagataataataatttttcgttccttctctacgcaaattaacaatctctgcttcttttaatatcttaagatgatgagatacagcaggacgagaaagatgtgttttttttgtgatttctcccactcgtataccattaaaatcactctctaagagagcaattaaaatcaattgtctagtctcatcacccatagcagagatagctttgcgacattctttaaatttagatgttatttcttgcattctttgttgacattctttttccataaaatccaccctctcttataagtatctaacagttgctacttctttctgtgcagtacgtctatatttaacatctgggtatccaattactaatgttgtaagaacatgattactgcgttttagacctaaaagcttttttaattttggcgaattatttgctacatctgaaaaatatccactaaataaaacacctagaccataagactctgccattaatgccatatttgatgctgcaagtgaaccactaatcttatcttttgtaattatcattattgcaataggagcatgcttaaagaaaaagttatcgtcaatctcaacttcttttgaatatttaatagctatatttgcaataggttttatttttctaaaaaatttcactgcttcgttttcataaattgactttttattgtctaaaacaatatatgatacatcttgtgaatttttagcactaggggtatacctacctgcctcaataatttgctttacaatttctgaagaaacttctttgtctttaaatttacgtatacttcttctagatttaattgccattagtaattcatctgaatctagctttggcttatttgtaagttctataggaggttcatcaaatcctgtcaaggtaatagcttttgtgggacatattgctgcacaatgtccacacattagacaatcttgttttttaattactgactttttattttctataattatattgtttactggacaatcatttttacaaagcccacatccaatgcaaagttctttgtcaacttctattatatgttggtatttcatattcattcatctacctttcgtttattagtttaaactattataacacgtagacattttttatattcattggtaaagaatttgattaccattaaatttttaatttctctattaaataaatttttcatagaattttaaagtatcatagtttatacataataaaaaagacaagcttaaaacctaagctcgcctttttcatcttttattacaaagtaaattgcacttacttcccatacttcttaacaattttattttctaaaattttatttgtgaatcatactattgcataaatacaatgtaaaataattctgtattgattttctatagttaaaaaagttaaaaattatacttattattaatttttatactcttcttatttaatacaaatttcttatttaacatagatttcttgtttaatataaatcttcaccatttgaagcaattactttcttataccattcaaaacttttctttttcattcttcttagacttccattaccactattatctctatctacatatataaatccataacgcttttccatttcacctgtaccagcacttactaaatcaataggtgcccatgtagtataacctaataaatcgaccccatctatagaaactgcatcatgcatagcttttatatgttctcttagataattaattctgtaatcatcttctacataaccattttcatcagctatatctttagcacctaatccattttctacaataaatagtggcttttcatatctatcatatacatgatttagtgtaattctcaaacctaatgggtcaattggccatccccattgactgtatgaaagatatggatttttagcagatgtaaatatgtttccttcagccatatcatctgcattttcatcagttctaacacaacggctattgtaatatgaaaatgaaataaaatctactgtatatttattcaataattcaatatcaccaggttccatttctggtgtaatacctttttgctccatatactttaacgcatagttaggatatttacctttagattgtacatccacaaagaagtaattttctctatctaactttgtagcttcccatacatcattaggattacaactataaggatatacacttccagctgcaaacatacatccaactaagttatttgaatcaacttcatgtgctattttagttgcaattgcactagctacaagctcatgatgagcagcttgatattttatcttttcaacatcttcaccttcttcaaagcaaataccagcacccataaatggagcatgtaaaatcatatttatttcattaaaggttagccagtacttcactaatcctctatatcttctaaagataacattgcataatttctcatagaaacctatcatttttcgattacgccatgcaccatactttttaactaaatgcattggacaatcaaagtgtgtaatagtgactaaaggctctattttatattttttacactccttaaatatattttcataaaattgaagtcccttttcatttggtgtttcttcatcaccttttggaaatattcgactccatgcaatgctcattctatatactttaaatcccatttcagcaaataactttatatcttctttataattatgatacatatcaataccagttttagctggataataatgctcatcatcaaaatcaaacatttttagtttccctgtaataactgctgttctatcttttcctgttggacatacatctacatttgccaatcctctttcgtcttcattgtatccaccttcacattgattggctgcagtagctcctccccataaaaaatcatccttaaaactcatagtcaaagcctccttaaattataaccaaagcactagcttatgctaatgcctcaatttttactaaaataagactgtaattagattatcttctaattcaatatttttactttctgtttctactacatctaaaaattgtgatgaatttgtaataacaattggagttacagtactataccccaactcttttattgcatcaacatcaaagtttaatatagtttgaccttttgtaattctatcaccttgttttatacatgcctcaaaacctctcccttctaattgaatagtatttaatccaatatgaataagcacttcaacacctgtatcagaaagaatccctatagcatgtagactaggaaataaggttgtaactacaccatctactggagcaactacttttccatcactaggtattattgccaccccttgacctagtacaccagatgcaaatgctgcatcctctatatcacttaattttaatacttcaccttttataggacttgctactatttctctttctaatttagtagacttgacttcttttatttcttctttccccttatttcttacttttttagactcttctactttctcatctttatataaaatcatagttaatacaaaagctacgaccattgatatagctataccagaaagagctactattaagttgcccattcccccatctggttcaatcattgctggaagttcaaatattcccatacctccagttataaattttctaagattaaagaatccgtagaaagcgcctccaatcccactagcaatacaacttattataaatggtttctttaaaggcaataatactccataaattgctggctctgtaactccaaatataccagatataaagtttggtattgtcatctcttttagttttttatctttagtcttgaaaaatattgccaacacaactgccgaacttgcaaatgtacaagcaaagaatggcatcataacattatcatatcctaaagtcataacattgtttatatatacaggaataaatccccagtgcataccaaaaataacaagaatttgccaagtaaaccctactatagcacctgccaatagtggactaaaatctcttattgaaattacaatttgtgaaataagtgtagaaccaaatgttgcgataggacctataactataagtgcaacaggcactgttattaataatgtaagcattggcacaaagaaaaacttaactaaatctggaacaaacttattaaataatttttcacacctagaagcaaaatacactataaatataattggtacgactgttccagtataatcaattgatacaattggtagtccaaagaaatcaatatatactggtgatgcaaacattgttcctttaaataaagtgtacatcacatctgctcctgctgatatactgctaccttgtatagcaggataacatactgcagctcctagtgctaatcccaacattggttttaatccaaacttcttagctgaagtatatcctaagaacaaaggaaggaatgtaaataatgcatctcctgctgcatttattaccatataaccaccagatacatcactatataatcccattgctacaaataatgcattaaatcctttcagcataccacaagctgccattattcctaacactggctgaaaaattcctgatattatatctatacctttatctagtatattacctgattttttagtttctgaacttgtacttgaatcatctaaaccaattatttcaactacatctttatagacagcttcaacatgatttcctataactacttgatattgtcctccacttttcattacagtaacaataccttccatgttttttaatacattgtcatttgctatactttcatcttttaaagtaaaacgtaatcttgtaatacagtgtactaatccactaatattttcttttccaccaacattgtttactatctcttgtgctaattgtttgtattttcccatttttctcctccatatttcgtttaaattaattttttgaaatttgaaggtttggccaactcaatgttaccatccaaccataggtataattttgttagtatcactcctttcaatcattcttaatatactactgaaaaattatttcacttacatatttgagtctttaactactttagctaaatgtattgttaaatatataagctcatcatctgttaatatgtagttatattgttttttaatgaaatttttaattttaactacacattcaaactctttattatatttagatttaataatgcttagtaattctttgtctgtctcaccttcatgtgcactatctaaaagcaatctttgcgcaaaaaactttaaatgcattataaatctataataaaacactgattcttcatgaaattctatcctaaaatgatacctaactatgctaagtacttcttgtattaacttcgtaatatcagatgccaaagtatgaccttcacttaactgagcattcactatatgaaaggctataaatccagcctcatcttctggtaattttatacctgttttgttttcaataatatctagtgctttcattccaatttcaaactcttctttataaaatcttttaatttcccaaagaattgcattttttacatttattccttctttcattctttgaattgcagaatatgtatggtcacttaaggatatgtaaatactttcatttagcttcttgtttaactttatttgtgcgtattctataatttcacttgataatttcatgtgttctataggaatattattgagtaattcttgtagtttgtttgatatttctttatttgatattctaaatactttatttactttagttttatctattagattgccttttgatttttgataaccaattcctttacccataacgataacttcttcatcattatcatctaatgtgattacaacattattgtttaatatcttattaattatcatgattatcctccttttaagcataaaaaaagcttatccataataatgggcatactccttcctaggatactgctattattaatgaataagcttagcttgtacttaaacaattactacctaattccaattaatatgataaaacatcagacatattttgtcaactttttatttccatatacttcatcaatcttttgtgttgctttttgtcagttataataattattatcattaatattaacttatttctttgcatcaatataaatacaaaacaagttatagtcaataataataaaaattctattaatgtaaatagttaatattatacttcctctactacattatctgtactttccttaacatttttttcaactccaaaaacatatgtcataataaatggagcaaccaatgctataaatataactataagtccatttactatatttgaaattcccttttcccctgataatccaagtactgccattatactattttgtggaacatataaagtcacatgagtaattcctgcaaataaccctgcgattcctgctcctatagatgctaacatagcaggttttttaagtttcaatgtaactccataaagagctggttcagttatacccatgatagctgatatccatgcagctgatgctaactgtttcatcttactatctttgcttcttaatgctacagctaatgtcgcgccaccttgcgctaaattagcacaaacttgagatattaatattagcgattcttgtcctgtagttgcaaatgctgatatgaatataggagtcaatgcatgatgcatccctgtcataacgataaatggcattgcagctgctaataaacaaaccattataaatcctaaccttccttgtagtaaatttattatactagctaatccctctcctaagaaatttcctattggtccaattactattaatgctattggcgcacttattaataatactaaagttggatttaaaattgtttttaacatgctaggtgttaatttattaatgaatttttctatatatgacatcatccatactgttaaaagtgcagggataacagatgctgcatatataacaccttgaattggtactcctataaatgatatagggtccccacttgatacccatgcagagaaatttggatgtaaaaacacacctactactataactgctattgatgtattaacattaaattttttagctgcatttattgcaagtattataggcataaagtaaaatgctacatctcctattatatctaatactctatatgtacttgaatttgatgatagccaattaaaagtggtacaaagagataatataacttttatcatcccagatgctgtaagggctggtatcataggtgtcatacaaccagttattgtatctattatattatttaaaatactattttttttattttcattttttatatcgcttttaatatctcctgtggtatttatccccttatttattattgcattaaatacaacacctacctcattacctattatgacctgatattgagttgaagttgagtttactccaactaccttatctatagattttaatttatctgcattgactttcttttcatcttttaagatgaaccttaatcgtgtcatacaatgagttaagtcaattatattatcctttcctccaagtccatcaattatcaattgagctacttcttcatatttattcttcataccttatcctctcttttaaaataatttttaatataattttaatccaaattaatctttttactccaagcttgtaatagtgtattgtaatttaataagctagtatcttctacaatatggtcacattttcctagtacttcttttttccccacaccaattgatgtcatattggcagcatttatagctttaatacctgaataagaatcttctattcctacacaatcatattgttttaaatttagcatcttgctcccttcaataaaaatatcaggatatggttttcccctttctaataaggatggatttactatacaatcaaattcatcttttattcccaaagattctaatatcctaggtgcattcttactagcagatgctattcccaatttcacattattttttttaagttcttttataagctcatttatccctggtaatatatctttatatgttaatgagtttattaactttatataaatgttatttttttcttcacacacctttaacttttcctctttagtataactatctactttattagcagataacaatattttatctaatgattcttccctgcttatgccttttaatttttcattaaaagtttcatctatttctatatctagcgattttgctatctcatgccaagcttcaaaatgatacttagcagtatctgttataactccatcaagatcaaataagactgctttcatattaattactccctttaaaacaattattaacttctattatgttctttgataattttatttctttattatcatgtaatatgcttatgtttttacctttgattaacttataataagatttatattcttctatatttacagaaactaaattatctctaaataatatattaaatttaatatttttccagtgtttaggtatccttggttcaaaacttaatttatccttttttattttcattcctgcaaatccatatactaaactcatccatgttccacccatattagcagcatgtattccatcacttgtatttttttgtaggttattaatatccattaatgctgtgtccataaaatagttataagctttttcatgatttccaatttcacttgccatcattccaaatattgaccttgacaaagatgaatcatgagtagttattttttcatagtattcaaaatctctcttcttttgttctaagctaaactcatcagggaaaagcaacgctgaaagtacagtatctgcttgtttatttacttgatatctatatattgttaatggatgataattgagaagtaatggatatttttcttttggtgtatttttaaaatcccatactgatttttctaaaaatgaatcgtcttgtttgcttattttcttctcttcatcatatggtaaataaatattttgagcggcatttatccagtcttttacttcatattcttgtaatttaacttttctaaatacttcatttgaaaataaattatgcttaaatttatctaccatctgtactgcatatattaaattatatttagccattaaattagtgtagtaattattgtttactattgctgtatattcatctggtcctgttactccatttatacagaatttattattttttaattctatataatctccaaattcaacccaaaatcttgctgtttctataagaatttctaagccattttgcatcataaattcttcatcattagttgcttcaaaatacgttctaataccataagctatatctgcatttatatgaaactgtgctgttcctgctggataatatgcactgcattcattaccatttatagttctccatgaatataagcaacctttatttattccaagttccctagctctttctcttgatgcatctaagattgagtatctataatctaataaagctctagcaatggatggttgagtatatataaaaaatggtaatatatacatttctgtatcccagaaataatgcccctcatagccatcacctgtaagaccttttgctgatatattagtctttccatctcttcctgctgattgataaatatgaaataaattggtttttatacccagttgaagagttttatcgccttcaatctctacatcagaggttgtccaaaactcattcattttctttctctgaatatttttgactttatcaaatccaatattacatgcttctcttaaaaccaattctaatgattttaaatgtgcttctgattctaaacattttaacgactccagacattctaatgattttaaacgttcttcatttagatttaaatcagaatatactctactatagcctacaacaatttctaaatttaacctttcatcttttttggcatagacttctatttctcgctcaatacattcatctgaaacattataggtctcatttgtaatatttccacaagtaatatatgaatcaaacccacaccataaccctaatctacttctttctgtaactaaattcataaaatacttattgttatatttttttacattaattttaaattgcttcttatttatagatgccactcttgggtcatctactttttcacaattaaacttctccatactattttccattttatttttaaattttatttttccattaaaattcaatggtgttattgtatatgaaatcatcattaattcttctatatcttgtgatactaatctttctatagatactttaacttttctaccacgagagttttcccatataaatgaacgtttaacaattccttcatttaaatctagtatcctagtatgttcacttgtaataccttttgataaatcaaagcaatctccttcaatagagaaatttactatatgagcattaggtaacttacagatagtctgattttgttttgcatagccataagcgctttctccatatgtaattggagattcttcataaaatccatttacatatgtacccatattatctacatactcattattaaaatcggactcttcaatattccctctaactcctaaatgtccattagctagtgtaaacaacgtttcattggattttattgtatccttactaaacccttgctctataagttggtccttagtagtaaatattaaactcataataacactcctttcttaaaatgaattatgcatgagtttccatatcattaaataaaatttctccatctgtttctattacttttttataccaaaaagcactttgttttttagttcttttaaatgagcctcttccatagtcatcagaatcaacatgaattatgccatatcgttttgtcatctttccttcacttacactggttacatctatacatccccacataagatatcctataagctctattccatcttcatttactccaagaatcatatttttaatatgttctttcatgtaatctatacgataatcatcaattatttttccatcttcatttacaatatcttgagtacccagtccattttctactataaataaaggtaactgatacctttcatataactgattcatagttattcttaaccctacagggtcgttttgccatacactatttgattttggaagatatggattttttatggtttctggtccgtttgcctttgatttttctaaaccttcagctctagctgaactacaagcactagaataatagctaaaagatacaaaatctacagtattatccttaagtgttgataaatcttcctcttttattattaattttatttgatttgattttaaataataattcataaagcttggatacacacccctaacttgaacatcagaaaaaaacaaattatgcctttcatgctctaaagttgcaaatacatcttctggtttacatgtgtatggatatgtttttccagcagctaacatacacccaaacttaaattctttatttatataccttcctatttctatagtttttgcattagctaataattgatggtgtgctgcttgatattttttctgaagttgattttcatcagctataaaagttaacccagcacctatatatggaatatgaattatcatattcatttcgttaaaaggaatccagtatttgacatcatctttatatcttttcatcaaaatttcagcatattttacatataaattaaccactctcctatcagcccacccagaatatttttcaactagagaataaggtatatcaaagtggcttatcgttattaatggctctatattatatttttttaattcttttattatattatcataaagttgtaatcccttttcatttggttcactttcttctcctgttgggaatattcttgaccaagatatagaaaatctaaaacatttaaaacctatttctgctaacattgctatatcttctttgtaattttcacaaaatttaatccctatatgacttggatagtattgattattttcatttaaaatattatcctcatctaaacatacatcttttaatctcttatcatttaatgggagtttatcaaactgagataaaccttttcctccatctaaataaaatccttcactttgattggctgaaattgcccctccccataaaaaatctttccctaatttcatgcatctacctctttcacagtataaagttttataatttctatctcatatttagttataagatttttttcatactataccttttaaataattcaatttaaaaatccaattatattttttactcactataattaatattgtctattttcaatactttcatattaaatatcaatattagatatctatgtatataattatatatatagcaaatacatttttatatcctcattattgttatcttattctcatatattgctgtatatttatatatataaaaggatttatttcgaaatagagattgtattgagaactaaaatttagactttataaatgaatggaattttcattgttgaaatactgaaaatatatttgatttcatataaaagaaagtgcctcatgaactaagttcattttgaggcacccccttttttctccaagctattatatctttttttaaattctaatggagagactccaattttttctttaaatactctgtaaaaagtttttgtacttccaaaaccaacttcttcaaccaaatctacaatggatatattgttattaagtaatatccactttgctttttctaatctatattcatttaaaaaagttataaatgtttttcctgtattttttttgaaaaatttagtaaaataatatacactaaatcctacttcataagacacatcttctaattttataggttgtttataatttttttctacatatttgaatatattgttcaatctctctaatatctctttagagtttatttcatattctactgtattttcttcaatttctctaggaatctgtctatataatataggaattaaattatacattttaccttttattgcataactatatccttctattttgtataggtcttcattgtagatatctatcaatatatcgaaaactgactttcttatttttgctgaccaatctctactacatttttttatactactgaataaattaattaagctttctttttcctcatttaataaaattaaatcattaaaaaaagatatatcaaattgaaatactaatctttcacttcccggtgatggcagtatataatgaatatctcctccttttattatcactatctcgcctttttttaattgcataggcttgtcatttataaatagatttactacaccttctgttataagtaatatttctatttccttatgccagtgtggtgttgttaatacttctccttcatttgatagactacgaaaaggaaattcatgtattaatttaggcatttctaaatatattgccatagatatcctctcctctctagtgtctaaaaattaatctatactatttaaaagaatacacattttattttaaaaacctcaaatttataatttatacaatacctacacttcataaaatatatctaatatttctttttttgtatgtacatttaaaagtctttcacttatatttttaccacctaaaatgtaagctattttagatattaatatcatatcttcattgcctccagattgtggcatagcaaacataattattacctttacaggtaagccatctatacttggccaatctacaccttttttagatttacctattactatggatgccttctttacatattttgtttttccatgtggcatggccatttgataacctatactagtagagcctattttttctctatgttttaatgcctttataaacttactttttaaagttatacttcctgtatcgtataatttatctactaattcctgtattatgccttcttttgtagttgatttcaaatctaaaataatgctttcttctgttaatatttctctaatttccatttgttttctccaatagattattcttaaataatattttaatatcctctttgctcttgcaatctattatatagtttatatagttcttttgcctatataaatttgatatttccattaaaatattctttaaaaaactttgattactaatttctaaataaatatcaatcgttctagtaacattattgatattcattatccctttatttaatttactttgcttatgtatatatatattcaaatcttttcctaatgaaatagattcatatttactccctaaattcacacctattaaactttccatctgagctacatcaaaattaaaatatatattatcttctaaatacattcctaataagtttgtatctaagttcatactttttttaggtttagaaagtaaagcattttttatattattaatatcactttccattaatagtactgatacaactatatgtaatttatctttcaaatctaagtttacagtagatattacaaagtctacatcatctaaatttcgcttactcaactgatgcataggaactatatcaactatagtccattcaggaaattctctttttaatctggctgcaaggagctgagatgttccatatcctgtatgacaaactactattactcttttactactcatatttctttctattgccgcttgaaaatatgtggcaagatacgaaacttcatctatactaatattcttcagattatcatactctgtcataatatttatagtcatcatacataatcccagcacatctgaaaatcgctcttgtatctctcctaacaacgggttttttatttggatatcatatcttaatctgtttaacataggccttacatgagatgctagacttttttgtagtaagtcatcatttttgagatttatatttaaaaattgtgacatattctctatcattatagatgaaactttttcactttcacttaatatatctgattcatcattataactactattattttcgctactaaatccagatgataccaaaaaaatatatatgtacataatttcatctttcgttatttttactctgtatctattttctattttatctataagtgtagtgacatttttatatactaactcgtccaaattatctacagaaatttctctttcttcctgagattctatttgattaccttcttcgattctctttaaacatataagtatatgggtaattaaatttatatagtagggctgatttatagtatatcctaaattgtattctaattctgtaattatagtttctacaaatataatagaatcaatatcaaataaatttatcaatgcactaaatgtagcagaatctaatcttgttaactcagatatatcatgttgttcataattttcatctaataaatcatccatcattttggcaatcgatttccttatatccacttctttacctataatcttagttccttctaaagttttattaagttttaaattgtattcttttatccatgcctctatatatttaaaatcatttactatagaagttttacttacataatatttatctgctaactgatttattgaagttatattatttgaatttagtaataaatactttaaaatctccattcttctctgctctactgataaagatttattttccttcgattgtatatttaaactattaattaagtctatgttcttctttgctaaatcttctattaatattccatagcctctttttatatcaatttttatattaaaagtttctaaatatttctcaatcatcttcaaatctttttgtaaagttttatcagatacatttaatttatctttaaagtattttataggtctatatttattttcgtttagtatcaatttaagaaattcaatttgcctcgacacaagcatacttagccctccctacctatgtttatatatttctatgtttatattaagtactattttaacatatttactaactatgtaaaattactaagatacttctgtatcataaaagaatttatgatacaccttactaaattgatataatagataatataatttcaaaataaaaattaaggatatttagaagtagttaactgattctaaatatccttattattattctatatacttgttgttattccattacttatttttactattatttataatttaagcaccaagtaattcaacttcactgttttcacttcttatagtaggctttgctacccctataatcaatgctgttattactgtaccaatcaatatacaagctatatatgcaactggtgcactacatgcaaatggtattacaaatattcccccatgtggtgccattaaagttatatctaaactcatacagattgccccacctatacaagaaccaattatatttgctggaatcattcttaatgggtctgcagctgcaaacggtattgcgccttctgttatgaaagatgcccccattatagcagttggtagagatgactttctttcttctttagtaaacttatttttgaatattaacatagctaatgatatcgctaatggaggtaccattcctcctaccattaatgctgctgatggctcaaatatattacttgaaaacatagccaatccaaaagctgaagctgttttattaataggtcctcccatatctgatgccatcatccctgctaatattgcacctaataatactttattagttccagacatactttgtaaccaagattgtaaagcttcatttaaccatgatgctggcgtattaactacaaagaacattatagctccactcgtaaatgcaatcaaaagtggacatatcaatacagcatttactccttttaatacatctggtaaattttctgttatcttcattactcctaaagctatatatcctgttgcaaaaccagctaccataccacctataaaccctgaacctccaataactgccataaaaccagctatcatagcaggaggaaatccttgtcttcctgctattgatttagctataaaaccagcaagtatcggtataaataacttaaatgctgaatcgcctccaagttgtccaaagaatccagctatagggttgtatgtttcatgagttgggtctgatgcaaatataccaaacataaatgctatggctataccaattccacctatcactacaaatggaatcatttcagatacaccactcattaagtgcttataaacaccctttgtctctgacccttgaagcatttcttttgaatcttctaaagtctttccacctggtttaatttctttagccattccattttcagcgtttataattaaatttttagctaatgaaacattcttagcatctactactttcttttgtagcactttctttcctataaatctactcagttgaacttctttatcacaagctattattacgtattcagctctttttatatcttctttagtcaacttattttctacacctatagctccatgagtttctattttaacttcatatccaagttcttgccctgcttcctctaatgctttttttgccataaaagtatgagctatacctgttggacatcctgttatcccaactataagacctttattttgattattactaaaatctcctgattctgcagctttattattaaatatacttaatatttcgtatggagtttctgcacttagtagatgcttaagaaaattttcttccattagatatgtagctagtttagatataatcttaagatgttcatctgaacctgattctggaactgctatcataaaaaatgacctaagtttttgaccatcattatctgtaatctctctatctgttcttaaatacatcattacaggttgatttactacatttgacttagcatgaggtatagctattaaattacccatattagttgatgattctttttcacgtttattaatatcagctataaacttttctttattatttatataatttccatggtacaaatgatttgccatataattaattacatctttttttgtttgtaattgtttatctagtacaatacaatcgcttcgtagtattttacctatcataaattctcccctccttttaatttgttacctcataattaatttttatttttataaaagcactttaacttatctatagcattgaatagattcattttaaactctataacttctcttgcagcttttatacatggtggatatatagtatctggctcatataagcttgggttttgttctaatagttctctgcacttcttataatatgccgacttaacatcactcgaaatatttattttacaaactcctagtttaactgcttgtgctatttcttcatctggatttgatgaaccaccatgaagaactaaaggtatatctactacttctcttatttcttttaataaatctagtttaagctctggtttaaaaccttttggatatataccatgtgctgtaccaattgcaatagctagtgtgtctactcctgttttttcaacaaaatccttagctaattttgaatctgtatatattatttcatcagtaccaccttcacttgatgttcctgttgttcctattgttccaagttctccttctacggacacatttaatccttttgctatttctactatttccctagatatagctacattctcttcatatggtaaatgtgagccatcaatcattactgatgtaaatccacatcttattgcccttaatatttgttctttattttccccatgatctaagtgtattaccataggtactttactcttatttgcttcttctatgcaactaactacaaagctatcgcctagaaaacttagctcatttgggtgtattgcaagtattactggtgcatttttttcgttagcaccctgtactactgctttaagtatttgcccacttcctatattaaatgctggtacagcaaattgattttcttgtgccacttttagcatttccttcatattgattaacatattgtacctcccgatattttaaattttaggttgaatttacttcttgttaattttgttgttgtttatatttaaataatatcagggtaatgaagctcagaaaataacaatcgttttccttattgaaaaggaacttttattatacactctaagttccttttcactaaataatttttagaagtctgtatcatagttaattatatttctcatgtacatcttctctttttaagtgttttaatttaatgtgctttagccatcctatatttttataataaacaattaagatactttaactataaatttaaagatactcatgtaatagttaatgctatatgggagtcaaaaaattaaaaagatattagctatttagccaataccttttcttggatttcaatagtatatacgatttataggaatcatactcacgattatttaatgttttacttccataaactttacataaaacaccaaagtgtcacccttcaaattcatctttagctaataaagtgatttggttttctaagcaccaatttataaattagcctttgttatcttatgtaaatctttttctatctaatttaaaaattattcctaatgctatatagcatataccaattactaatacaccataagccatagatactcctatcttaaattcttgcatattagttacaatagaaattgaaataggtctattataaacaccataaagcaaggctgacattgtatattccccaattgtacgaatgaatactaatatagctcctgaaattattcctggcatcatatttggaactattacattataaaaggtttttatccttccagcacctaaactccttgatgattcttctagtcctaaatttattgacttcatagcaacctcattggatgaaaataataatggtagagcataaattgtatatgctataggtacaatataaaaacctcctattaaggattcattaaaagcaaatatacttttttgattaaatgtattaattaggttaactgcaatggcgcttgcaggcatactccaaggtaacattataataaattttgctagtcgattatatgcagtatcctttttaattactaaatatgatactggtacagtaattatcaatcctactgctactgccattaaagacattttgaaactatttaatataggctgtaatacacgtgatttttggaaaatcatctgatagttttccagtgtaaagtctctaggaaatatggttgtcataattgaatgtgtgcttacaaaggataaatacacaatagtaactataggaagcataatcataataatttgtatttcaataataaccttacatacaaatgtaaataagtctttttttctattatgaactttataactttgagattttaaggatggcactactccatattttttgccataatactgtaataaaatcataaataaaatccccattagtaataaagtaattacttgaactgaagctatatccatatggttattagccttagacctaacaatttgagtgcttaaaactttaaaaccaccacctataagatttggagctgagaaagaactaatccctgatgcaaaagttataatagtagaagttataacagcaggtgtaataacaggccatattacatcaaaaaatactcttagctttgatgctcccattccttttgcagcttcaactgttgagtaatccacatattttaaggcaacatatacatttaaataaaaatatacatactgagtataagcaaccacaaataaaattccctttaatccactaaaatcataaggttttttgataaaggggagtaaaatttctatagattttgtaactattccactttctccataaatctgaatacatgcaattaccataattactccaggaatcatcattggacttagtaaaagaatatgtatgattttcttatgtttatcacaaacaaatgtcatatataaggcaagtgatattcccataattccacatacgaacacagaacccaatcccaaaattatagtattgcttactacccttaaattattagtatttgaaaaatattctttaaaaacttcaaaagaatatccacctttaccttggaatgcttgtacaaaagtattgcctattggtatgataatatatccaatcaaaatccaaaataatatactgtataaaacaataaaaataacatttttagatgtaaatttactacggtttatttttttaatcatattagtcaccttgtagcacacctaaatatgccatatcccctacgtttaatttattgctattattcagtctattaagctcagttacttgatattttttcccatcatttgatactgtatattctaaaattgctcctagaaaattcttagattctacttttacttttacaaaaccactttgatttgtattttgcaataatatcatttcttcaggtcttttataaatataaggctttgtctctttttcaatattaaaattaacataatcttcttttccaatacagtttgaagtacctacaaagtttgctacaaaatcattcaatgggcttttgtaaacttctattggcacaccaatttgaagaactttacccttatccattacagcgattctatcagaaatagctaaggcttcttgttgatcatgggtaataaataaagtagtaatacctgtcttttgctgtatctctcttatttcttctctcatcttgattcttaaagctatatctagattagacattggctcatctaataaaagcatagtaggctcagtcgctaatgaccttgctactgccaccctttgttgctgtccaccagataattcatcaatcttttttttcctaaaatctttcattcctgacagctctaaataattatcacatttttcctttataatttttttagacagcttttttattttcaatccataagatacattttcttcaactgtcatatttggaaacagtgcatagttttgaaaaacagttcccatatttctattttctggttctaaattggtaatgtttttatcaccaacataaatacttccagaagaaggttttataaatccaccaattattcttaaaatagtcgtttttccacatccagaaggacctagtaaagtaaaaaactctccttccttaatagatatattaatatcatgtaatactttttcttttccataataatgattaatttcttttaattctatattcttcatatcgtctccataaattatctaatatttataaatctctaaatatacacatgatgaatcatcatagattttaaatctaggaaactctattgccatttcatcatccttttctagttccctaacctttctatatatataatctatacctttaatctctgctattttcatcatttcatttttatcaaaaatcttatatctatcatatccacatgaaaaaccatcactagccatcataattttcattttatattctatatcaataaatccacttacacaattgtcaacggcctctttagaaaattccaaagtccaatatccccccacagtatttttcttaagtctattctctattataatcgcattacctcggcttttctctcctttaaagtaaggtttgtagcatctttggcttctttcataaaatcaaatacttttttatcaagttcacataaagtctcatcttttaaaattttcacagattcattattgttaactaataaagtacaatctcctaaaagtaaatactctatcttatctttataaaactttaatatagaacatgaacaagaaggaatatctattgcttctacttctttatcatctgttaatttgtagtactcttttgttatctcctcaatgccttctttaataattacttttaagctatcttctctttccatattctcatgaagataactattccaccaacttacataccatttggcatcactttctgtagagactaaatttttattatttaaacctgtagctccatcaagtacccatgccccataaggtgataaacctacgatatcttcgttaaaagcgccactacctttattacataataatttataatcactaatttttagttccatttttatctccttgcccatataaattgtacttttactataattaaaagttttgcataataaaaaattcactttatttgagagactatgtctacaaatcactttatatagtcaattacttcatcagttactcaaaaactattttatttaataagtatgtattagtatcattttgttgtatgaattatacaaaattatgagatactatagtttccttatacgtaaaatagcgaggaaaatcctcactatttttgtatataatattaaattatttaattaggctattttatagttttattgttatctattatatctgtttcccacttttcaatccagttagactgattttttccaattacagaccaatctacatccatagctttatattcttttgacatccactttggtgaatctttaagtgcagaatctaatgttggaatacgattaaaatcatttgcaaccatagcttgaaccttagcacttccaacaaaatctacaaatttagctgctgcatttggatgtggtgcattttttagagctgctacacagtctgtgattactacagaaccgctctctgcatctacaacttctaatggcatattatttttttctttattctctattatatcacttaatactgcaacagatattgtagcttcacctttacctattgctgaatacatgacacttccactattgtagtaattctttatattcttatttaaatcctcaagatacttccaagcttcttcttcactcttagtatttgagtagtaattgattaagttactaatagtagaacgcatagatgatgataatgaatctctagtaactattaagtctttgtattcttcttttgttaaatcactccaatcttttggcgctttatcagctgataatagttttgtgttataaaacatcattactggtgtttttatagttccataccaatatccatctgaatctttgtaagacttgtctaattcattattccagcttggttcagtcttttcatataatccttcttcttttaattgcatgtatgtagatgtatctccaccaaacattatatctgcttgcggattatctttttcacttctaacacggtctgctagttcaccttttaagtttataaattcaacattaactcctgtttcctttgtaaattcttcagaaattgctcctagcatatcctctccatgtgtagtatatactactaatgtatcctctaatttatcactttttgatgtgttatcattgctacaagctacaagtgataataacattgctacagttaataaaacaactgctatttttctcttcatattgattcctcccccatattctccatgttcattttaaatgttattattcttgcagtcaatgattcaacaacaatctatataattgtatttttctataacagcttattttattattgtttttttctataattatacctatttttatacatataatttttttattaacattaatccatttttcaatctggatattttatttctttaaaacctattttaaatattagtattattatcatttatatacataaaaaatgacctataaataggtcacctaaaataatacttatatagtatatgagatactttcttaaatcacttattatttttttatctagtccactttcagtaaatagtgtatgtatgtgtatggtttccattttaagtcttaattaaaagtgtgaactactgtaagaccatatctcatcctcacatctaagctttaaagttttatctattatttattaattggctgtatattcactaatttttatcatttacagtagtcttcttatcttaaaataattacaacctaactttactcatacattatattatttataaatatttttaacaaaattaataattaaataactatattttattaacaatcttataaatatttatatcctatctactaatcttcttcaataaattcaaacaaattttctactgtggtcccgaatactttagcaatatccatcgctaactttaaagaaggattatattttccattttctaagtgtacaatagtctcacgtcttaccccaactgatttagcaagttcgttttgtgtcataaggagtttttctctatattctttaatttttgttttcatcgatattgccacttagttacatatcccccttttatcaaagtatatatacaaaattaatttagataacgattgtataaataaaactgcaataagaattataccagtatccaagtttgatatatttatattacttatataaggtgttgcaaagaaaatagctattataactatagaatacatcattattgttattgcaatctgattaacctttgatagtataaatttagatgattcatcaactaaatcattatattttttattataaattgaatagcatccaaagactattaaccagctcagtcctggaagagatgcagtacttggacctttaaaaatatacttagtagctaatacagctataaaaagataagttattacaagtaattccaatatgagttttgattttacaccagtttctgatttagacatataaaatccaccttaaaggttatatatttataacacttcatgttataaatatataacctttccaaataaattgcaagaaaatattgtaaatacttaataatatttttacaaatatagtccataaaagatttcataatagacatctaatggttacaaataatattataaaattacttttttattcactcctatagaatcaacgctctaaaaaattcttataccataaaaatatattctttagtaagcagtacagtactagattagtttattatatctattgtttcaatcatatcatttaccaactattatcctaattaatataagatattgaaatgtataattatacagcctaagttcactccaatacaccctcaaaaatatctctttttttgtggatgaagtacagttggggatttcattactaaaataaaaaatactagccaatattgactagcatttacaagtatttctaagtatttcattatttatttttacaaatcattagacacgaatctcaagattaatacacaggattaattcatttcatatacaatcctaggttttcatcaaaaatatacgtcactttactatcccatgatataatacaacagaaaaaactacaatctatggtggtttcatatattcttagttatattagtaggaaagaaatgtactccatatggaactaattataaattttattattggaactatcatttctatttgtgttggtataaatacaaattatatatatgataaaattctaaactacttatctattgccatagaaaaagtaatttaaaatttgaatttaaaattaaatcttaaatttatttattacaattcattagttcgaaaaaatatttagagtcatgcgtcttataaaggttcaaccaagaacttaatgcttcttctttaaaaacatctaaaacttttaaaacttgtactgtaaattctaatggtgcaattccagaagcagtaattaaattttcatcattaaccgcagattccattttataatatttttctccagaataacttagtatcaccatttttaaaaattctaaatcattacttgtatgatttctaaaatctagtaaacctgttttagctaaccctaaagtagcaccacaaatagctgcaactatagacctttgttccaaagcctctttagatttttctaatattttctcatgacctatagatgtccaagtatttccccctggcaaaattaataagtcattactttcaatattaagctcgtcaattgtaatctcaggtaaaacttttaatccacccattgttataataggatttttatcaactcctactgtaattacttttagtggttttaatccttttttaaaatatcttcctgtatttaattcagcagttagatatccaacttcccaatctgacatagtatcgaatacatacatatatacttttctctttttcatttttttgctccttctataattaattaatatacctaattgtaaaataacttaactgacatactctgtcagttaagttattaaatttgataatgattaattaattcgagtaaatcttcaaccattttatccctaaggcttaatggttcaattatttgtatagattttctataaggtataagtatattcggtacatatgtaaatattatctcttcttgaagtttaaatattgctttatttgaagtcctttcttttaaataatatcctagaagccaatgctgacataagttatccaatgcattcatctttccttctataactaatgatataagattatcctcatcttttgtttcatccataatccctcttataaaaaattcacttgctgaaaattcttttggcctattaaaagtatttgatgtttctatgacactactaattctatctaccctaaaactacgaatctcatttctcatttgacaaaatgctactatgtaccaattattattccaacgtacaattccatatggatttataatcctacattttgatttttcttcatgagctgtacgatagttgatttctacagataattcatttgctatactattttttaactttttaagtacagattctatggatatttttccagttggttttattacttcaaaacctattaaatgttttgttaaagtttcttcttgtttttgatttgaatacatttttaactttgaggttgctttgtctagtgtgtcatctaagaaacttccctcttctttagcaaatatagctgcatgaagtaacgcagtttgttcttctgtatcgaaaaaaagaggtgctttgatgaaattattcaaaagtgtatatccaccattatgacctgtatctgaaattataggtactccactagcagataatgcatcaatgtgtctgtagacagttcttatatttatttctagtttttcagatatttgttttgcggtaacttttttgtctgagtttaacatccataatatggacatcatattatcaattttagccatatagttttaccctttcatatatgttttataaatttaattatataggttattagattaatttttataaaaaaagggctatcgcacgagcacactaaatttgttctgtaaaggctccttattcttatctagttttttaactatttatcttggatacctttatggtacattaatccattttctaagtgtacaatagtctctcgtcttaccccaactgatttagcaagttcattttgtatcataaggagtttttctctatattttttaatttttattttcatcaatattacaacttagttacatatcccccttttatcaaagtatatacaacactaatttagataaagactgtataaataaaactgctaagagaattatacctatatccaaatttgatatattcaaatctcttgtacaataagcttcaaagaaaatagctattataatcataaaagtatactctttaataaacattacaatatggaactagattagtttattatatctattctatcagtaatatcatttactgactattattatcctaatgaacatgtagcaaatcacacactctaaaagaacccaatataccatcagaaaagcctctttttctgtagttatggtatgcttgatggatttcatcactaaaataacaagaggctatcgtatgataaaattaaatttgttctgcgatagctctttctacttgtatacttctattcactctaagttcacatccctctggtcttataattctctttaatttttcttttttcatgaaataacttagatacttgtaagtttttagtcctattttcaagaggagtcttactattattacccttaataaagctgcttttgtactgacaatcacgaaattcttcacatttatacacaattttaccccaagagtcgtaatgagtcacaaagtaattcagtttctacctgcctcactgatagtaatcactttatttgtttacttgttatttatattaaactaaatatatcctcttgaattaattcttctttattacctatataaaatttactcatatacaccaattcatcagttttattttgcttaatctcattaatatccacaaattctttattagaagtagttttttcaactgtcattaaataaatcttattaaacattgctcttatagaagcatttgttacatgagtataggatataatttgaacgttgaattttttagcaagttcaaatatttctttaaggaaatcttgctgcgacgtttctccaaaaggattatccataagtagtaccttacccttatatttactttcatcaactattgcatttctatcatatcttttatattccatcaacaatattgtcacaataaatgagatacaaaatctctgtcctcctgttgtttcgttattaatagagttccactttatagtttcatttctatttatttcatattttataactgatacaggaattctccctatattaagagtcttatttaaaatataaaaggtatttattttttgttcaacatcacctaggtttgcttcttctacaatttcatccattagcatatctactaagctcaaactattttctattttatcagatttaggtagtgatatgttgaataaggcttgtcctttatgtttaccaagtttatttatgattttaaattcatcaatacagtccataacataatcttttatttgccttgatattatagtcttttcttttcttagttgttcgctatgtttttctaatttgcttatttcttctcttataactagtaatactatttctacttgttctttttgtcgagagtaattatctttatttacatttaaagtttctataaagtttttgtatttttccatgtgcttataattaaattcttttatttctaatattgtatttttatagctatttatagatttaattaaattatattcaacattttgcagttttgattgtagttttttactttcaataaaaatatcttcaggttgataggttatagcttttctttctactttatatttctttaagtctcttaattcctgttctagattttgacaagtagttctattaccttctataatttcaccaatatcctttatatctttttttatatctatttttctttcttcaaaattaaagttcactattaagctagtagataaaggttcttttccattaaattttttaagtatctcctccctcttagtgtttaatgaaccttgatttttatctatgtcgcttttaatactatatttaagttttcgtagttcatcaaccttacttttatttaaaactattcttttattaagttcttctattgtgaataatataggtatattttcaaaattatcactactaataagttgtctaaattcttctaactctatagtaatactctctattctttttaagcaaactgagatttcataatttaatgtttcaatctctttttttgtagggtcttctaagtatttcttgtattttatttctaattcttctagtttagcattttcaagtttaataggttcataaatcttaaatttatttatcttgctttctgtatcatctatatgcctatttatcctatctttttctgaatttaaattaaatatattaacatcaatatcttctattgattttttaataacttttttttcttcttcgattttttcaatacttgtttttaacttagttatttcatttttattttctaaaattatagaatatgtatcttgtatatttctaatgtccttcaatttattaaataatatattcttgttatttaatagcttttctttattttcgtaaagttctttaattttattagataaattcttctcattattttcattactcttaattttattgtttatttcaaatataatttttttataattttcaattttcacatctatggataagtcttcagctgtaaaatcaattttattagttagaagtttaaattcttctaatatttcaatttctgctttatattgctccactttatctcgaatactatttatttgttctttgattagattcatatccttttctcttttttcaggatctaaagctttgttatcgaaagaagatagtatatttaatccattactaattacaaggttactagatgtagttataaaagtatcttctatgttatctcttacaaatataggcattgagattttagttttattttttaagtttatttgcttcagtttttgatactctttatttgtaattattatagaatatggtagcaatggatttttagatatgagattatttttgtattctaaatctccatctaaggttaatagatatttcatgccttcaataggttttattccatttctttctagatctgttaatatttcttcttcgaaaattatatctttataattttgtaaatcttctagctctttttctaattgctttttattattttctaagtcctgtacttgaagtttcattttgttaagctcttgttttacctctttatatagtttagtagagttatctaattcattgtctatttcaaatcttgttttaatgattttatatttttctttaaaattatctatatctttctttctagtttttaatacttgcagtttcatataagattcatgattatctaatttaagattatttatagcttcatttatatcatccttaagtttattcgattcttctatttgcatgactttcgattcaagattttcttctattgattttacttttatatttaaataatttatatacctagtataatctattacttcgcctaaaaaattattagaaataaagcctttaatatcagtgttattaagtttaaattcatgtagttgattattaaaatcacgttctttgccttctatatatttaatttctgaatttttacttatcaatacttttgtgagcttacttttgtcatcattaagttgattctttttttcttgtatagctatattgttgtttgtattttctttaagtttttcattatttataatactttcttcctttaaacaataatgaatactgctacctagacgatttataatagccgttatttcttcttgatttacctcttttctttgtttttcactttctttttctatcttatctttttccccttcttctagccccttcttttttcttttgaactttgatatatttaaatattgttcatctaattctagttcttctattttatcatttaattcatttttggctttatcaaattctacctgagtatcttgtatctctttttcttttctaaaatactcatagctatcttcttcatattctactatcttaaattcctcttcttttgatgctttcattttttgatactgttttatttcttcatttaattcattgcgtttattttctatatgtacatatagattagctaattctcctaatacattatttttatcttcttctatgaataggatcctatttattttattttgtaaactttcaactctaatgtttaaatctctatagtttttataatctgataatttttcattcatgtctataatattatttatacactttcttacttgttccttaatttgcaatattggagcgaattcttctgttgttaagcttgtctctattaaaggtaatattttatctcttataagtttttctgaagtattatgttctttaacaaagtctgatagtccaccttctttgttattactattaagttttataataatttctttccattcactttggttaattccatattcttctaatttttctctatgttgttttcttaagtaattattaaagaagtgtactttgttttttccatatttatctcttagcatttttatatagtcttgtgaggccgttaaaggttgtactatccttatacctttgtcattgttttttaataaaggtatattatctatatcaacctccatttctttagattcttctataataaacataaagtatttgtataaatcgtcctttttttctttcccttcttctttagatgatccagcctttttctcaaatcctattcccgttaataataacgttttaccatcatctagcaaccattcagtcattgagtataatggttcttttttattatatattgcagtaaacggtttggctacatccgatagtggacaaatactttgtatgatagtttgaatactcatagttttgcctgctgtattttctgcttctacttgtaagttttctccatacagttccatggttctgttgctaagtattctttcttgtcccataccaaatttaaaatttataattttgtatttattaattactggcattaatactttccccttttcttaaaactagtttttctattaatactttcctttcttcatctaaaaaataattattcataagatcaagaaatcttctagttggttttatcttatcttcatcctcaatgtgtacaattaagccttcattttttaagaaattaattatttttctaataaaccctatttggaaatctgctgatgttgtttctattcctttcttactagattcgtcccactttcttttactttcccaatagttctttaagatagttatattaaactcacatgatttttctatttcttctagattatcacgagctattgaacgttctaaggattcttgtactaaatccagtaagtttaatacttgaatatatgatgctggtgctaccccatttgtaaattcagaaaatattattgtcattatcaaatatcctaaataactatcttttaaatctttccctaataaagattctcttctatagtcaaacccaaaaatatcattgtcattatttggtattaagtataaggtatctgaaattaatattatttttattttagatacttcacaaattgcctctaaagcataccttacattactgttatttatataagctaaaaataattctttagcttctttttcttttaactcactttttttaagtaatctataaaatatttcattggctattttatagtcatttaaagatatattcattgtatttccccttatatttagattatttcaaattttatatttgctatttctagcttaactgcagtcatagtttctaaatttatttcagtatttattttcatttcatcttcaaatattttattacttttaatatggctaacgctatttaatagttcaaaatcttctactaataaacgttctattaatctttcaatttgaaaatctgtatttggtgagaaggcactattttctaacattctgattatctttttgatattgatactttccctttgattagcgaagtaaattattatatctctcatcaatttggagtctttagttatttctaagtaaataactttgtcatatttcagataattttttagaaattcttctaatgtaaattgtcctttttcaagtccatatttaattaagtatttaaaaaaatcaaaatagtaattttcacaataatttatacgttcctccttctctttattttcaataatttctaactcgtctttattaactatttcattttcaatttctctagtatttaatagtttctgttcttgatatgccactccaatattaaatcgatttggcaactctactttaaataaagatatatataattctcttattatcaataaaaaatcactgtctttttcaagtctatctaagatttcttccttgaaattgaatcttttaattactggagttgttaatagttttttaagtatttctttaaattcttctctaaaatcttgaactctagataacaaatttgtggctgtagactttgctaaaactattccatctattaattctttcatttgtaatagttgagttcttatattttttatcttttctttgtctatatcctcatccttttccaagtagtcctctttatctttgattaatagttttacttctttttttaattcttcatatttgtccatttcttctaaaagtgtttctacagttgtatctattactgttgaatatttttcttcttttatatatagtatatttacttttattatttttatataattatcaattttctgttgatgaatctctaaggtatttattatatcgtaaatatcttcctttgcgccttgataatcacccttttctatccttaactttgcaatcatttgtgatatttgaatttggaatagttcatcatattcttttgttgataacaacaatctataaccctctgttgttaaggagtaggatagtctttcctgattatttatttttacatttttatcttctataattttaatactttcatctatatgtttttcttgttctaaagaatagtaggtaaatagatatactttaccactattggttaatccattaattatatagtttgctaaatcctttaagtcatcctctgaaagcattattttataatccatacgatttatttcttcaataaaatccttaatatcatctcttaaacagttctttcttctaagagatctatcaaatatataacacaaaacttgaattaataaattgtaaaattgaatgttgtcaaattctttaaatttatttctattgttagcaagagttgcaataagataataagatcctatacagtttactctcttattgtagccttctaaaatattaatcatttccattagttatattcctccaagtcgaatctatttagagcttcttgaggtatgtattttccttgtactaaaatatttttaatactttcttttaagtttaggttattaatattttctaatccacattcaaaattatctttttgatttttggggatattcctcaaggtattttcctttgttttatctatcatatgctcataagcaacttcaaataatcttatattattaatttcattggtatcttttagggaagtgtatattgataatccagttttatctatatctccccaatataaaaattcattttctttatttgtaagatattcaattgttatatcttcctttaatcctttaatactgttgattattttttttccttctccgtatataacagtatctattttatttttaagtatttcttttccttctaatagcatttttgttattgttatgtaagtgtctttattttctataattaatattttttgtggagatatacgatttattgataaatatatgaatggctctggtgtcttatatacgtttaaatcctttattagatctatttttaagttttttagtacttcttttcctactttactacttatgaatttctcatccttaaatatttcataagatctttcgttaatcgatattttctttgatagattatcagattttttaataagataactatttaaatccattattgcaactctattatttttatagtgtactaagttttttctataataatctatacttaatttatcacatattttgtaatttatttcttctaatatttttttatcttcttctgtttcttgttttattattctatactttgtatataattgctcatgctgaggtgttagatctgaggtttttattggttttattttattatcatttattagtttttttattatgtgtactagttctttatgctcattgattttgtatattttttgtatttccttaaggtatatataagtcttttttatttttgtaatcatacatgtttaaatcccttctttacttataactatattatacaccattttacaatttcagattatattgactgtacataaaatagtacatattagataatgacaataaaaaaactagaacttaaagaaaatctatcagcactagtttaagtattatttatatattttgaatctctgtttttatttattagtataacaaaaacttaaatccttaattgtagatgtcaacccaaaattgttccaaattttaattgaaaataagaccactcttcatttatatataaatagtaaattcaaaataaaatttcacatgaatttactattctgcgctataatgcaacagaagaaactacaatctatgaatgggtttcatatagtcctagttcctacagtaagtaggaactaggtgtattctatagaactgatgatgaatgaattatactcatcttaggagacagttaaaatatgtaagactatctaaaactaagatatcttcagagcaaaaaaatcgaagcaattgaatcatatttaaaaggtgagaatacagtaataaaaataatggaagaattaaatattggataaacgtacattcagagagtggatgcgaaattatgaagcttttggaaatgatggtttaataaaacaaagttgtaaattatgctattgtgaagaatttaaattgaatgctataaaatcttatctaaatggtgaaggatcttatgacacaatctcaaaaaaatataaaatgagatcagtttattcactaaaagcttggggtaaagagtataatcctcataagtagataaaagaaacctcgaagggagaaatctttatggagactagaaaaacagcattagatgaaagagttgaaattgttaaagattgtagagagtgtacagactaatgagagccgtaggcttaagttctgtttgcagaaaaaagaaatttagttatgttaaatgtacgccagaagtgatcgcggaaaatgtattaagtagaaaatttagtgcagataaaacctctcaaaaatggttaacaggtgtaactgaatttaaattaaccaatgggatgaaggcctatttaagcgcaattctagatttagacgatagaagtatagtttcatatgttattggaaagtcaaataacaataacttggtgttagaaacttttgataaagcaatagagctatatccaaatgcaaaacctatttttcataatgataaaagtttccagtatactagtaaggtatttaaatcaaaacttttaacacaaggcatgatacaaagtatgtaagagttgctcgttgtattgataatgctcctatggaaggattttggagaattttaaaagtggaaatgtactatttaagaaaacttgatacatacgaacaattagtcaaaacaatagaggattatatatattactataataattttagatatcaaaagagattaaattctatgtctccacttgaatttaggaaatatttaaatacagagatagcataatttattttaagtagctctaaaaaaatttaaatacctagggttttatttgacatgctcttttttagatatctgatataatttctttggctaattgttttcttaaagcgttcataaaaaatctcctttacgacatttgattatatttaaataattgccataaagaagatttttattaaccttaaaagcacaaattattttacattaccatgatttattttataacttgttaatatatttctaatagccttgtctgttcatttaaataaccatcattattcattactaaagtatttatttctttaattttatctctttttaaatttaatgattcaaatttattatcttgtattttattctttataaataagtatagaatcatatttttcatattagttgaagacgccttatattctatatctgctatgggtgaacaagatattatttttttaatatcttgtattaaataattattttccaagtctatatcataataataacaaatagaagccaacacaatagatactcctatcaagtatttactttgtctttgcttatcatcagatattaaacttgttgagaatggatattctatcttctcagatattttcagtatcatcctattaaactcatcaaacttatcttttaataactctaatttttcactttcattatttttatactgaattgacttatactctaaaaatttcttagaggctgtaactccatctctgatattttcttgtagcccattttctaaaatactaaatattatacatatttcttgatgatttttttgtttatcattacgagatttagttatgttatatattctaagtaaatctgatttgtaattagcatatttatattctgatttatctatttcatccttatatttatcttttattagagtatttataaatttacttatatacttactagtttctgaaaaatatgttgccatctcgatttcttgcatctctaatggttttgtatttctgttatatcttttaaataattctatttctatttctggattatcaaaaccatcaaattctagaattgataaatgacttcctaatattttaattttatcttttttctctaattctgaaaaccttttattatcatatagtgggtcattgcctaatatatctaaatttttaagtggatatttattcttaacatacctatatatagcattcaaacgatgctgcccatccattacatgtcttatttgcatatcatttacacctatttttacaagaaatatttcaggtattggtattccaattaaaagagattcaattatagaactttcttccttgtttgatgatttatatgtacgttgataatcaggactcataactattccttgtaaaatttccatttcatctatttcatctattgataatttcaagtacttttctcctttatcaataaaattcacaatatcttggactgatacaagaggtctgtttgatttaatattttttatagaatttttaaattgttctctcattataaatttccccctactatctcatcataatagaattttatagatttaactacattatctttatctggataaatattttcaaatgtaatacctaaattaaataattcttttaatatttcttttttagcatctttattaataactactactttacaatacttttttaatttttccttaaattcgcctttatcttctgatgatacttttaggaaacatcctttttgaaaatgtattctttcatttgaattccctacctttataaaaaatgatcttgatgaaaatttactacaattatctattgcagatgtatctgaataatttactaacttctcagatctttttatagtgtcagtattataagaaatagagtctataaagtacacaattgaatgctgttttgtatatttatagtcttctattgcaaataataatgatattaaatgagcttctgtgaaatctaaatattctgttggtagtccaaaatgttgcccttcagctcttaattcttcactcgatctattttttatttctttatcataataaattattttttgtttgaatgcttcctcgtattcatctgaatgtataccatagtcttttttatattttctatgtaatgatggtaataattcatacatacaatctttttgccctctagatacatagtcgcctgcgttatctagttcagataaaaatgaaacatactgactcaaatttgatataaatataacttctgattcaggtatacctatatatttagacatagtattttgtatattatactctttccacttttcattttcttcatatattttatttacagctttagatatatgttctatatttatatttaaatttcgttctaatttaatattagttatatcaactaagtcctctattttaacattttttaatatatctatatctatagaatttatttcacttttatcattagtatctataaaatatgattgctttaaatagcataagtttttcatatatagttcaaattcagttgaatcttcttcaaatttatttacctccataagcatacttttaatttgctcatctcctaattttgaaatatattcaatatcatctataaatttatccattacctcatataatacatcatcctgctcacttaaatcattactaattagtaatttattatcaaaaattttacatattactgactgcattttctcccccattaaaattatttttactctaacttatctatattataacaaattttaccatattcggttagatatatcgttttatttatgacaacttagatattttataaaatttttaagtatcatctattaatatatattataaatttaaatcaataaaaaatgggctaccacactagaaaattgatataccctctttatgggaagaaaaattaaagtcttagatgagataaggtaatcttaactacacattgtgttacatataaatatttctaacacacttaataattaagtaactatatttcattaaccatcttataactatttataatctatccactatccttcttcaataaattcagacaaattttctactgtagtattgaatactttagcaatatctatcactaactttaaagaaggattatattttccaagtgtacaatagtctcacaccttaccctaactgatttagcaagttcattttgtgtcataaggagtttttttctatattctttaatttttgttttcaccaatattaccacttagttacatatctcccttttatcaaaatatacatacaaaattaatttagataaaaactgtataaataaaactgaaatgagaattatacccatatccaagtttgatatatttatattcattgtatgaggggttgcaaagaaaatagatattataactatagaatatatcattatttttattgcaatctgattaatctttgagggtataaattctgatgattcatcaactaaatcattatactttttattataaattgcatagcatcaaaaaactattaaccaactcaattctggaagagatgcagtacttggatctttaaaaatatattctttaataaacattgcaatacaggactagattagtttattatatctattctctcaatcatatcatttactaactattatcctaatgaacatgtaatattgaaatgtataattatacaacctaaatgtatatcaatatggggctgttgcatgagcaaattaaatttgttctgtgagagctcttttctaattatcttaataggtatattttcaattgttttatataaagtttctgttctaagtaaaattatgcatgacaaataaagatataaaaataccattttttcagataatatttgattataaataataattttagaatatttttttaaatgataaagatatattccacgtttattttttactattttattgtgtagtctagaaacgttataagctatcgccacaataatatatccttataaaacattttctttaccttggcttaaaaatcttgtaagtttcatattttattttacttgagcgaaagctccttctgcttgtatacttctattcactctaagttcatccccctcgaggctcataattctctttaagttttcttttcttttttcatgaaacgacttagatacttgtaagtttttagtcctatttttaagaggaaccttactattacttctcttaatacaattgcttttatattgacaattactacactcttcacaaatgtaacatgttatttcacttttatatcctgtttttgatttcctatttattattttattagcaaatagttttttctcatttgtacaaatataataattattttcttcttcataatccatattgtcaatacatccaatataagttttatattttctagttttaataatttcataatttgcaggttttatgaaagataactgattattatgctctaaaaatgcatagttttattcactttcatatccaccatcagctattactttaggatatttaaacttagtatattcctctatagattttaaaaatggtattaatgttgtagtatcagcagtttgatttcctgaatttagccaaactatatattcttaatctacaccaaattgtatattatatgctggtttcagttgcccatttttcatatgatcttctttcattctcataaaagtttcatcgttatctgttttagaacaactatttcgttcacccattatatgaaggtttttagtagattttctatttccttttccatgaataaatgctacatttgcttcttttgatattttttttagtttctttaaatgatagattttaattttatcttcataaactattttaatgccaacatcaatctcacatttcaatatgaagtcagatatattattcaccattttagccatatttttatttacagcttttttccaaacaaaagtatatctattagcagatgactctatttttgtaccatcaataaatattgtgtcttttgaaatttcattattatctccaagaaagtttgtaaactgtgcaatcaagcttttgcctattagttaaaaatgtatactgcgaaattttgcaattgttgaatggtctggagtggaggtttcgcctagaaggtacataaaattaatatctcttttgcatgttctttctatttctctcgaagaataaatacagttcatatctgtatatattataactttcaaaaattgtctatggattactctatttcatctaattcgagaataagtcttatataatttttctaaattcatctcctcaataatttaacttaataaccttacagaatcatcttttggaatcatgtaatcaatatttagtggtagcttaaattgataattatcaccataagtagtataatcaatttgtgtagtattttgttttagcatacagttattatacaagaatcccaggttcttttgaacttgggatttatttttttatacaaaaaagagcgtagcactattttctagtgcgacagcctttttatttatataaccttctagttgtgtgctaattgtgtgcttttaagcaaaataaaaggaattacttagtccaaacataagtaattccttttattctattattttcattttcaaaattggtggagacgaggggagtctacaagtggttatttgattgttttgttggttttcgtaagtgtaggtatatagctatttagttatgatgttatactaatttttttggatattttttattatttatttttgtggttggggtattattggggtataattttctactttctaaaactcttgctaattcaataatataaatcaaactctcagttaagtttcttaatgaataagtaaatttacaactaatttagtgtaatctaaacttgtagtgcctagtcacaactctcaccccttcaataatttataactaacttagtgtaatttaaacctctctactaaaattacttccacatatagctacagaatttataactaacttagtgtaatttaaactgtacctgggtcttttatcttacttgtaagtgtacttctatttataactaacttagtgtaatttaaacattgcagataggtctgtgccatcattcgtgctgttacatttataactaacttagtgtaatttaaactgggatggattttgaagcttctatgtcaaatgtacaatttataactaacttagtgtaatttaaacgaaacctctctttaaaattattcatagaatttataaaatttataactaatttagtgtaatttaaacattgttgctagaaaacattaaaatacattacacataatttataactaacttagtgtaatttaaacggctggacttgtaatagttgtaactaaaattagtgaaatttataactaacttagtgtaatttaaacgggtagaatgaatcaaatagcaaaagtactttccggaatatttataactaacttagtgtaatttaaaccccaaataaaactatagtaattacaacacttgtagggttattaaaatagttaatttgcagtgaggcaccagtagtgtttttagctaaaaacaaaaattcagttataaaccttgccatcactaactcacagccatttacacatatttttcgctcactgcaaaattattctattgtaacatataaaatttgtagtcgatataaattataacaaattctcaataaaatattttaattagttatactataattctcttaacaatcaaatattagacctagtttatcattataactataacttgtaacaactatatctccacattcataaaacatctttttattataattgtatctttttacagatacatttacaaataatgaactcgcttctaaatacatttttttatcaatatacaacttgtactcttctaaaagacattcaggcacaacactaatagtatcattatttaacatatcattattagcagatttattccatacccctaacctcatatttttcattataatctctaaagcaactttatgtttattatatttatccatatctatatctaaatagacattatctaaataagatggaactttactctcatcaactatagaattatcattatgtattatatctgatattactatatcagtcctatttattatatcttcatcatatatattaagctttctatcataatcatatatataaatattgctcaactcagcattatctccccttctatttactctaccaaacctttgtaacaatgaatctaaaggagctaactctgtataaagaacatcataacttatatctaaacttacctctatactttgagtacctatcaataagaagctttcttctatccctttttctgcctgctctctatctctagtattaaatcgaccatgtattaatttaggattatatttttgaagccttccatataactcttgagataaatctactgaattaacacatattaatactctttttccttgcattaaatcattttctattttatgtatgctatcaagtattccttcacttaatctattcaatctatgtctaaatattaaatctttactatctggttcaataattgtacttatttgcaatctttcctgtattaacttttttaagcaagttggtatacttgcactcattatacatatttttacatttaagttttcttttaaatattttaaaaattccaatgtataacacaatactcttgtatcaaaacaatgtatttcatcaactataaatatactatcttttaattgtgatagtagcatttcaaatctcttacaagaaaatactgactttactaattgaaatatagtacatacattaatttgttttacactctttttgtatatctggtaaagttgttttatatcttcttcatcactaattttattcaaaaaatatggagctttactgtgtaacatacttacgcttatatttctattatataaattttcatataaagaatttatgcttgctgtataaggaagtatataatacactctcttacttttatattcattttgaactaggttactccaatacaatgatgttgctgtttttccaagacctgtcatagccattatcattatatcttcatttttatccatatttaaaactttttcttgtattgaattataacttacaccctttggtatactaaaatctttaatagaattaaatcctttatctatacttttaattcccgcagaagctatatggtcacaatattgcaagtaaccttttaataatatattttcaagttttctagtatcatcatttcttgctcttgatatttcctttataaatggtcttatatcttctacttcaatatctaatagttcctttaattcctttaattcaatttcataaatagaatttgttatttgaccctctagaaactttatatctttatggtgggttaatatagctaacttctgacctctatttaaatacttaatacttgctgataataactcatgtctaactcttcttgtgctactttcaatattatcttgaaagctttttactactttccctacatcatgacatacaattgcctcatataaatcatttttcatatcattagatatattatatatgctaactaattgattcattatgtaattcatatcttcattatgcttatctatacttgtcccatctgatttagctttatattcatataaattattcatgatatatcctttataaagtctcctttaaatattttaagtaactttcaaaagcttgatgtacatttgatattttcataaaatcatactcttcaaactcttcttctaaatacttctttatttgttccttttcattattaacttctatctcattaaatgtatcatcataaaatttatttattccaatccatatatcgctttttctaaattcttcattttgttctatagattcttttaacatctctacatctaagccattttctttgataataccctgaaatacattatttccccatgaatactctcccaatataacaaatttgggttttgtatcagttagatgatttgtcttattaccttctacacttaagtattctagtgattttaggagagcttctattcttttaaacttttcttctttatctaacttttcaactccaattgatttagcttctaaagttgtataatctctatgctcacttgctatatcagatatatcatattctcctatctttcctatattaagatttgctatatttgtatgtacccctgaatatacctcaacttgatatggcatactatctcctgtagttccacaaacattccactcccattcaacttttctatttgatacatttattaaagagttcatttgccatcttgactttctttttttagttatatttacttcatatttctttttattttttttatatatttctttttcttcatctgataattctttgtatacatcttcttctatagataatttttccgccatcataaacccaaatatatcatctgtcgcatatttaaatgggtttggaaccaattttacttgtttcccatctttagttttaacattttgttcataaccacaaacttgttccataaatagcttttgattgtatttttgacattgacttgagattctacttctgctccctatttttttagtataagtagaattcttatatgaattatttttcttttctacttcactactacttccatttaatcgcccacataaaacttctattgcatagcctatatttaacattctatttgaatttttattttccattttaaccctccataatattattaaattaaacttactaatattaaatttttaatctgtctaaagcttcttatatcatccaactcaatataatcctctgcttcaaatagtttttctccagttttttcataatacatttcatttaagttaactaaccagtcctcatatgcataaaattttcctaacattttaagctccttatatattttgtctatatctaagtcactagtttttaatttatccgttaatttttttattatatctattttgacttttttcaatacatttacctccctgtttaaaaaaataacaagttcatcaaaattcttttgttctttctcatccattttttcttccttttttaccctatatacttctctgagataattgctttctaaagtaccattcaagatatacctatccaaatgtaacttttcaaagtttgatagtagtgctttttcctgtaattttattaataaattcacatatttattttttattctatttacctgaatatcctgagattgaccagagttattaaacatatattgctctatatcaccattaaataagttatatttacacactagactttctaataattttacaattgaatacttttctttttctttctttgctcctaactctacatcagttaaattttctttttgaatatggaaagtataatcttccataaattcgcttgatgtagaattgtataaaaaagcatacctacttactctacaattcagaattgaatacatagtcaatactaaacaatatggacatacattcaaaccttgcaaattattggagaaattataaaatgtatttgcaaccaaattaggcatataacttctccctatattgtattctttatcttcaattttgactttggccttatattgaccacataaactacaatattcatctccttgatttttaacaaaaccttttaacttctcatttaaagtaacttttccttttggttgagttagcgtagaattgctaaagcacatactttttaaattagagtatttttcgcaacttacaaattcttcaattttatcactcattaaatctatactattctctatatcttgataagttatatcattaatatctttgttcagataataagccaacacatatagaccattatcaacaaatacattgtaacttctatccatattaagccctcctagaagttatataagttagtaaccccattcctatactatttttttcacctaatccacaataataaattacttcttgcatatctttattagcttgtacaaatatttcaaaatctgtatatccaattataaatccttttccttttatattagttatatatttcttttttactgctaatacatcctcaatatcaaagtatagttcaccagtatattctttattatgtataagcttatacttatttcctaaattatcatgtaatgctttataaaactcttcttgcattggatttaagtatacttgtttcctactttttaaatcatataaacttgctacaataggtgaccttactttataaagtgttatattattaaaatttttctttgaatcttcttctatatctgaaactttaaactctatattattcaatttaaatactttacatttaataaaaccttttataatattattcaatatatcatcatatccacttaaaattaatttgatttttgtttggggatttaaatgtattccctcttttaaatacttagcattttcaaacataattgtgtaattaaataatttaaatactttcttatccaccttatagccttcattgtgaagacttagtgcttttcttttatcattaatttctatagcttcatatatccttttcattagctcatactggtaattgtaatctaatacaacttcattatccactgtgagtatcaaatgtcttcttactaaatgcatttaattactcccccttttttccatttccataaaaaaatattctgttgctcatcttcatcataatatttaccatattcaaactcatcattttctcttaccattgaagaatatatatcataataaccttttttttcattatactctgtcaatgtatttattctttttatcattccatctccaatattaatatctgtatattgattgtatccaatagcttttttatctattagatttacttcaatttcacttaaagataataccttcgctaaacaattagtcttacctaaacatagcggctcattaaattctatatttttatctatgttagtatatatgataagtttaggattaattaggtattcaatgggacatacatcagtttgaaatctatcgctatctgtcaatgtttttacatttggattgatttctttatatatagtctgtaaatctttaaatgtaccatcatgatatataacatatcctaatataaaatcatctatttcttcaccatatatattttttaaaattccgacaactgttgatattggtggaatttcatatgttctttgtatcttgctatgcataggaattttaaagtgagccatatctccaattatttcgattttatttaatatcattttatctcctcaaatatttagttaaaatactccattttatttataaaattagacattcatttataaaaacctttaatttttaccattattttcctaaaagtaacaaatatataacttaattagattattttagtgaagtttctaaaaactttacacttaccttaaatcaaggttctccttcaaactttcaatatagtacttgtaattttctaaaatatttctatgtatgttcatttatttaacaataaaaatacatttctatggattcatcatacatgttagtcttaattaattttcatcaataacttaagatatacctaatcggttagactaatatacctcaaatacttaatttataaaagtagctgttatactttagcaactaccttttcctaataaattttttgattttttatattagtatttgttgttaactagtttagaatatatactttatacatctctgccacacataagcattatttactatcttttataatttgcttcaaatcatcaatactcaaaacattatctttcttcctgtgaatcattctatgacaatttgaacatattggcaccaaatctgttttgggatttatattgctttcttctccaacagaacttaatggtttaatatgatgaatttctatgtatcccttacctctatctccatacgttttttcgaagtcaaacccacatacaatacactttgtgccatgatattttattgcttctattctatttctggggttacgctcatactgtttcccataaacatatttaactttcccttcttttctaatttcagtttctaattctatattaatagtattaatgttcaaaggattatcttgacttatctcctctaatacatcgtcttctatttcagcagtaaaaatgaattctatgttaaaattattactatcaagttttatgaatcttattttaggtaaatttgtttttccttctattttattttctaagaatttctcataatactcagaaaatatacttcttagtaaatctctaaacttagatttccaaattattctacttcttggattctctaatttatccatctctataactgcactataataattatcattatatttaaaattcacatttttcttttcattctttcctaaattatttatctcaaaaaaatatcttatttctattggaactcctgtcccattatgttttaatgtagatttatcaattgtttttaaagctattttctcatctaataactcccaagagtcaactattataggatactcatttatatttctaatttctaaaagtatattaataatctgcttgaaatgtatctcatcttccttaagaacttcaattgctttatctattgtgtatcctgtaaaaatacctttatgatttttatttattcctaaatgatgcactatacccattgattgataacctttactttgttttgatgataaatctagtatctcatcatctatctttctattactcatattatttttaaataaataattataaactactttgtttatttgctctgatgagtatttattaaactctctttttctatcattaggctctaacttaggtattatcatattctcctcctcaattgattattttagattttaataaaattattgtatcatatatttattattaaaatatattgtgctatttatcaaaatacgtaaatcctacaatgtcattgattgcataaaaataaaagagggcatacttatcccctctttattaaatatatttattttaaacaatataattaatatatacttcacttaaaatattctagtacaacttattaataatctcgatttactatttaattattctattgagatacacaaattaattacttcaacaactctattataaattttgctcctgttttaaatcctaatttataactaagttctctttcaaattctattaatgaattaaacaaatcatttaattcaaccaacagatatttcttatcatcttccaaatttatttccaataactcattaatttttttaacctctttccaacattcaatataatactcatctttttctaaaatacttctatacatatgttcatttatccaataatcaaaatatatttctataatttcatcatacattttagtacctccttgactttcatcaggtacttaatatatacttaagttgctaggttagtgtacattaagtacctaatttataaaggtagttgttatatttatatggcaactacctttttctaataagcatttaaatctaaactcaatatattttaaatctctattacatctaattaagttttatatatttaccattcaatacttcttgaaacataatttatctattacttaataaatcatgcttcttttttatatctcttgtatcttcttacattcttcaaaagaaaacaaatttcctatataccaatatggtctaaatcctgactcaccatctctatttttggcaacaataatctcacttaaattagcaccaaaacctttttctcttcgtctcaactctcttatatcctcaattcccattgtcttgcaataattaagagcctctttttctgtaggtctatgaatatatataactgaattagaatccatatatatctgctttgagcttctcattactctatcccctttaggtctttcatccttcaattcatcatttaattgagcaagctgaataactggtatattaaaatctaaagtaatcttttttatttgccttgataagtcagcaaatttagcttctcctacttctttaccttcataatccaaaatttgcaaataatcaattatgactaagctaggcttagtactctttatttctctctttatccctgatactgtatttacagagtcatttatataaaggttattttcttgatttattatgcttaaagcttgtatatatttgactatttcatcatcatttagatttctatttttcatttttacaactgatattccagttagtgaggctatatttctaaacagaatctgtatatcactcatttctccacttataaaaagtactttctttccttgaaatattacatttctaagtatttgtaaagctaatgctgttttcccccttccacttttggctgctattgtagttagttcacctccatataaacctcctatagtatcatctaagaactttattccagtcttaataccttcattcatttcatcatttatatattcaaaggctctctctgatatggctgttatacttgaatccttttttattaatttctgattggctttatttatatcattttctaactgatatataagagtattatcatctatttctccaagattgaacttattgaatttatcaattatatttctatttttatatttttcaataactatactgacataactcgtgaaatttgatactgttgggactattgttgacaaactggtaatatagcttatacctccaatattattcaaatgaccttttctctttaattcttctgtaagagttattatatctattacttcatttctcttatttatttcttttatagcattaaatatgtatttatgttcctcatgataaaacatgtcttcatttaacatttgctctaactcttctactattgttgagtctaataaaatgcttcctaatattgattgctctgcttctgtatttttaattaagttgtttgaattatttataatataacctccttaccactttaattgtgaatcatctggattatatattcctgtctctttatttatgacaatttccttgctatgataattgccctctagtatcttggtaaaattacttgaattcattatccaatcaaaatttgctttccatcctgtattattatttccattcagaaaacttgttttactaactatatttataacctctaatacagcttctttatcatattctcttattattgaatttattctcctctttcttgtgtctgttagtttcttgacctttgaaagttcaatacaagttgagttaaatttgcttataatttcactatatataatattattttcattctttatattcttgattgttgttgattgattgttaatcgtctgttgattaggttgttgattttctatgttctcttggtaaagctcccagttttcaatagttatgactatatatttgtttgttgtttcgtatgttagaaaaccagcatttttaaaaaccaacaaacaacttctaaccatttgataactaactcctttaccacatctttcagctattttgctataagaagaaataaattgtccagactttatttttatccttttattatctataaaaacatgattttctttatgactagccataagtaatagagttattaatattacttttctttctggtttaatatctttccaaattgatttatccaacaactccctgtaaagctttatccaccctttattgctcaattgcaaacacctactttaagactataacttgataccatttgcattttcaataaaccaatcatccaatttgttttttattatgtatactcgattatttatccatatacaagggaaacctttatttttagagtgacataactgcctaaattttgattctcctataggataaagcttagatgcttctttacatgttataagttcagctttatttcttttcgcattttcaataattttatatccttgctttttttcttgtgcttcttcttcattctttacaataatgtttaaagtagcttgtaatgtctttaaaacttctaaattattattctctttcatattttactcctccttactaaaaaataattcttctactgttgtatctaaagctctagatagtttaatcatcaaatcattgcttggattattagccttacctgtttccaagtttgacaaataatatcttgatataccaactctatctgccagttcttgttgctttaaaccttttttaatcctaaatatttttaaattgattcccatactttttcctccttttttctagtttacattcgtaaactttacattttaattataatgtcgacatatgtgtgctgtcaataagaatatattatttttctgttctcatttgtgtacttttgggatatactttatacgaggtgataatattgcaaattggaaaaaacttaaaaaagataagaaaacaaaaagaactaacacagattcaacttgctgaaattagtggcatctcaagaaatgctctaataaattatgaaaatgataaaagaatacctagtatagataccttatcaaaactcgctaaagctttaaaaattgaaaagactatcttttattttgatattgaaaatgaagtaatgactaatgaagatgttttatattttttacagtctttattcccagaagaatactattcttttgatgaatttttaaatgctatttcaaatcttatggaagatgatgatattaggattacctcaagtttattgctaggtgcttggtctgataaagaccaatattataaacttggtgaaaaattagaactaaatgaaaatcaagtttataattggatactttcagattgtgtatctaatactgaattagatttttcattacatcctgatgatataaaagaaattattaaaaatgatgttcttataaaacaatcaattgatgaattattagatattggtctatcagaagaaaatatagaagcaatctatgattactttagtgaggcaacagataatgggagtaacattcgactaaaaaagttaatatctcaaaaagaaaatatgactattaaaaataatgattactttaaattattacaagaaaataatgaattaaaggaaaaaaataaaaagcttgaaaatacacttaaagaaataaaaaaactactaactaaaatataaaataatatcaatactatctaaagcaatgataaaaaactacaaatggagttacaattattaataaagcatatatgctaaaatacacatataaataccctactaatttattttatggagataaaaaatatactctaacatacattaaaagaattatgagtaagttagtatatgatatagataatctagaaaataactcctttatatgtgtaaaaatacaatcattgtttgatgatatatttaaggtggaattatgataaataatacaatcggagaaaagattaaacaatataggaaatcgataaatatgtcaaggaatgagctagccaacaagattggttgttcagttcatgctatagctaaatatgagcaaaatcaaagaatacctagtctagatatgataagaaaaatatctactgctttatcaattgccataaataaactcattgttgaagaaaatgatttagatactttaacaaataataatattaatttaaaagtatttgataaagagttggatttagtagttcacatattagaaaattatggttatgatataaaaacagactataaaaaaaagtttgaaattacagataatgcagatacaataaaaccaattagcttaagcttctctgacttcaaagacttctccaaaaatctaaattgggtgataaatggtcttgttgaaaattttatacaagaaaactctaatggtcttattgaagatgaggatgaagaatattagtattgcacattttcaaaatatgggtttacctattaacttttatacattcatagttaataaataaaaattagatatgaaaggagctaaaatcatgaataaatcatatataccaaaatacacacataaattccctacgaatctacctcatggagataaaaagtatactttaacatacattagaagaatgataagtgaatttgtatatgatatgggtaacctagaaaataaccccttcacattcccagaagtacaaacattacttgatggtataacagtaggtggacataaattaagtgaccaaaatcaaatactaaatataaaatcatcatgggattatataataaaattaagtaacaaagaaaacttatctttaaataaagatacaatttgctctatacataaaatagttgcaaaagatgaagctctaattgttggagattttagaaacggtaacataggtatagctggtactactcaatatgagtgcatagaagccactctattaaataatttatttataagtgacataagtatcataaataaaataactaaccccttagaaaaggctataataataaatttatggttgtcctattgtcaattcttctatgatggtaacaaaagaactgctcgacttacctcaaacctaatacttataagtaatgatataggagttctatcaataccagccaaacataaacaagaatacaacacattaatgctaaacttctatgaaacactagaagctgatgaagttataaaattcttattagagaaatgtattacattcttcgatggatataactataaatcatataaggagttgtttaaaaatggcaactaaaagagctaatggagaaggctctatcggaaaatataaagatggttggcgttctcgtataatgattggttataatgaagatggaaaaccaataagaaaagaattttatggtaaaactcaaaaggaagttaaagataaacttgatgcttataaaaaacaatattatttaagttctgatatttcagatgataaaataactttagagcattggttttacaattggttgtttgaatatagaataaaagatttaaaaccaaagtcatttgaaagatatgaaagcatctatcgtaattatattaaagatactgatttaggcaatgttaagttaaaggacttaagagtatctcacatgcaaaaatattacaatagattgcttgattccaataaaagtatacctactataaggcaaataaacactaaactgaaaacctgcttatcagaagctgaaaaacaaggtcttatacaacgtaattattgtactatggtaaatataccagttgagaaaaaggaaaataggcttgaaatattgactcttgaacaacaaaagaattttataaaagctatagaggggcataaattagaagtattatttttggttgctcttggtactggacttagattaggagaattattaggacttaaatggtttgatattgattttaaaaattctaatttaacagttaaaagaacccttcaaagaacatattttatagataaaaatggaaatagagagcttaaagtattagagcaagaaccaaagacatcaaattcttacaggactgtacctattccaaaagatgttttaaataaattgaaagagcataaagtaaatcaaaatgtggatatattaaaggctggagaattatatagaaatgataattatgtattttgcaatgaattaggtgtccctatagatgataaaagacctttaaggaatttaaaatctatattaagcagcttagatatagaacctataaagtttcatggtcttagaaaaacttatgcaactagactttttgagaatgatgttcctcctaaaactgtacaagttttaatgggtcattatgatatatcaataactttaaatatatatactcaagttatggaagataagaaggttgaagctgtagaaaagttggataaaatattttcattgtaaaaatcaaatacataaaaatactatgatttcatatagttaattacaaaacccaaataaggatacaaattaattttatattatcttgtatccttaattcgtatctagttttaactatttatcttggatagcctttatgatacattaatccattttctagcattaattcttgagccaagtatatatgacccttacagtgcatatctgatacaccctcacttataagtttatatgtttcagaagtatataaataatccatactttcttccaaactcttgcctgtctgattagaaaattctaatataatttttttatatagtatctgtaataatgttttatttgcttccataagcactatacctcctcttcacatctaaactttaaatatttatctattacattttgattagttatacatatttgttcatttggcttatagtattttaatctttttaaagcttcatctttttcaataagattatcttgatacagttctattgtattgtaaatcttatcatcagcaattccacctattataacatcatatttcatatatacatcactcatatttctacattctaatataaagtcaagccattctaaattataactattgaagatttttaccttgcagttttcttttaatttatcaatatctagagaatagctatttaaatatgcttttttaccccttttcttaaaacgttctatccagttaattgcctgtgtttttatactggttacatagaatccttttccaaaatctaaagaatctcttaagaagataatattaggcgtttttgccacacagtatgaatcatgatatacaattattacatcacgcccttttcttcaagcacttgtattaaatcttccactatataacttttactttgagaatgtagtgcttcatagcaaggtattatatagttatctaaaatatcagtatcatgtttaagaagtttataaactccttctgaatctatattcaacttttctgctaaagcttcaatgcaaaaaatagaaaattctagttttctttcatccattacaaacctcaactcctatccacttatataatatatatatttttattaattaataacttaaaccatcttatgtttataaaaatattatatcataaagtagatattaaaattctatgttacataatatcataaacaaataaagactagcatttccaaatatttcatcatttattttttaactcagggaagatataccacttgaacaatatcctcaactgatattttgatatattaaatttctattataaaaattttattctaattataaatcatatagtaatatacattcattactttataatttgaaacctcttacactaataaaatttgaaagtgctcattattcaatacaaacatgcctaaaattatattttaatttttacactatcaaaaacatatatattaaatttgacccacttaaatacagtaaattaatttctacaacatgatataattaaattatgacaaaagactttgatatttataaaaactttccaacagatgtctcttataagatttttttatataatcttaaattaaaaaactcattaatatgcccctattgttattctgataaaattagtacttataatgatttatttcattgcaatatttgcaatagtaagttttcaattacaactaataccattatgcataaaactaaactagactacagaaaatggctacttgctattaatttatttatatttgatgaaaatattagctatagaaaattatcaaaaaatatcgttgttaataaaaatactgcgtacaagatgataaaaaaactcaattatctatatacatattttaaaattgatattattagtcttataaatactaatttatctaatgaagagatactaagtaatatcttacttattaaaataaaataaaggatggtgttaaattggaatcaaaagaaaaaagtatattgagagcaacacattttggtattataaaaataggtgaaaaagatttaaattgtgctgtactagaaaatggttcaagaatcataaataaaagtacagtattcaaagcttttggaagaacaaagcgtggtagaaaaaaagatgaaattcgtgtaccttctaagcctaatctaccaagttttattgatgcaaagaatctatctgattatatttcagatgaattagaagatatgcttataaatacaataaaatataagactaaaaacggaagaattgtggaaggttatccagctgaaataatacctcttatatgtgatgtatatttacaagcaaggcttgataataaattagctgttcagcaagaaggactagctatagcaagcgaaattttagtaagaagtttatccaaaatagggattgtagcattagttgatgaagctacaggatatcaatatgatagagatcgtgatgagctgcaaaaaatattgtctatgtatatttctaaagagtttttaccttggacaaaaagatttcctgatgaattttatagacaaatgttcagattaaaaaactggacataccctagaccaagttctaagagacctggaatagttggaacatacacaaataaatatgtttatgatttattacctcctggagttaaagaagaacttcaaagagttaaccccacagtaaaacctgggcaaagaaaacataaacatcatcaatttttaacagaagatataggtaatgatcatttaaaaaatcatttattaaaggttataaccttaatgcaagcatcaaaagactggaaagatttcaatgtgctttttaatagagctttcaatctacctgtacagctcgaaatcgaatatgatgaataatagactatagcctttaacaacgctttaaatacttttaatttatattataaaaatagaattaacttatatcataaaagtacttattagtataggtacttttatgatatattatttaaattttatatataatatattgtctatatacaatagtcttgttagtattaaacttaataattctatgtgtttattatcttaacatttttcaattccttttttacatcttatttttttaaatacaattaaaaaatttaaattagcatcccacatagataataaatttgttctatacttatacataatcttataggattctgtatatcattataactagtaattactctaatagattaagtagcacttatatgctttaaacttctttatccttttaatcataagtttaaacaagttatatatttcctagattgaaataaaaagcataatataaaaacaattcatcagtataaaatatttattgtattatcatcaaattcactatatctctaaaagtattctttatatgttccatggattaatcaaatgcaccccaatataccccaaaaaaatctctttttctgtggttggggcacggttggtggatttcatctccaaaacaaaaaacactagtcaataaagactagtatttccaagtatttcatcattcttttttaaaaattggtggagacgaggggagtcgaacccctgtccgcaaatcttttccttgctgcatctacatgcttagccaacttcactaatatctcacctcacatagcgccaagtggcaggctctatgcttagccagtcccaattaatctacttcaggtcgagacacccctaaagtagttccctgcataatgacgtccagtcttagtcggcaggaggactaagagggacgagcagcaactaggctgctatcgcgaaattatcgtctgcgtttattttaaagttccccagtttttacgtgacccagagtaacacgacatgcagcctcaagttccaaacccacgtcgaaacctttacgcccccttgagtagtttatagtccagtagacttttcgcaaactttatcaccatttttattaaatttttaatgtatatataatataatacttttaagaataaaaatcaatgttatgttctagataataaagaattttattctaaaaaatacagttttatctagtttaatacttacctgtcatttctctttctatacgtctttgtgcatctttcttagccatatcttgacgtttatcatatagttttttaccttttgctaaggcaatctctactttaactttaccgttttttagatacaaactaagtggtataagtgaatacccctttatagtagttgctccaataagttttcttatttcatgcttatgaagtaatagttttctaactcttaaagaatcaacattgaatatatttccttgctcatatggacttatatgaacttgttttaaaaatacttcactattatctacagatgcaaatccatcacttaggttaactttgccttgtcttattgattttacttctgttccttttaattcaattccacattcataagtttcttctataaaatattcatgtcttgctcttttgtttgttgctaatatttttttaccagccatataaatctcaccttctttgttagaaatttattccataaatgttagaaatttactaaatatttaatgttgccaaattatttgactaacttgtatgataacatatttaggcattttagtcaatatttcactgatatattaagttagttaggctatatataattaagtaatataaagatatgaaaatagctaaaaaactacttcgaatatacttaatactaaactaactttaaccagtaacactgatttctaaatttcaaaacaaaaatattacatattataaattttctatcttctatcttctatcttctatcttctatcttctatcttctatcttctatcttctatcttctatcttctatcttctatcttctatcttctatcttctatcttctatcttctaaataattttaacatgcccataaaatataatacccacaaatgataaataatactcaaaatatctattgaaataactatacatccttaaataacttaacttaaatctaaacatttcaaaaacttcttaaaaatatgtaaaaatttgatgataaagtagcgattttttcaaaaaaaatgtaatatagagttatatcttataatattttagagataaattttatcatagttgggagaaatttgtatggatttaagcaaaaaagtaaaaattttagaaaatgcatcagatggcaaaagcgaatttgaaatattagaatttgaaaaacttgagggagcttctagcccattaatggcaatgggattatattttgctagagaagctggtttgaaagctagacaaattaagataaaattaaataattcatcaataaaaacagaagctggtgcattatactattataaaggaaatatatcttctgaaactaagattggtggtgttggaggtctttttaaaaaaggaatatcaggagcacttactaatgaatcaatgatgaaacctgtatacaaaggtactggagaagtttatttggaaccttcttttagacattatttatttatgagtcttgataatgattctataattgttgataaaggattattctattgttgctctgatacaatagaagtaaaagcatttacacaaaagaacttctcatctgctttacttggtggtgaaggcttcttccaaatagaattaagtggtactggtgtaatcgttctggaatgtgttgtacctcaaagtgaaattgtagagtatgaattgaaaaatggagaagaattaaaggtagatggtaactttgcaatagcaagaacatctggggttaatttttctgttacaaaatcagataaatctttaattggttctgctttaaatggtgaaggtttcttaaatacatttactggtaatggtacagtttggctagctccaactcaagtaatgtatgaaaaactaagttttggagcaatgcctactaatgataatatgaataataaagtttctaagcaaaaatagttgttttataaatatttattaaatcattattgattttataaagtcactataaattttattagattattattataaaatcagagtgtggaaatgtttatgtgtattctttaaataaaaatttccacattctgtaaggttattatacttgatatataaaattcaatttaggaacatagtctaacatttataaacatattaaggtaatgatttctcttggtaattattctcatatcttattctttgattatatttatcttattcctagcccttatgtcatattatatttcttatcttattatttataattagcattaacttatctaaaatcttgtatttttttaatagtaaagtttacatctatattaaaaagtttacatctatattaatttcataaaacaatcaaggtagtcaagagattcaactttatttgattttaaaaatttaagtgaatttgttcttatacacatctttttaaaattatatctgtagaaaatatcatttagagctataattaaattattaaattttagaaaatttattaaaaaatataagttaaattaatatttttaaagattcttttttataactactagaatactaatttagtagttattgtatctctaaagtttaagcatggatagatatacatttgataatttgcctataatttacctactacttggagtattggagcaaatacaatatattaataataagttcctaaaaccaataaattaactaatacacataaagatattgatgttgattatacaactataagaaacagatttaacagaatttaatcaagctaagaaattacatatatcgtgatgtttttgaattagaaggtaattcaaaattagtttatagtcttctgtgaatccaataaaaagtacagggtacaagaattgttagtaaaatttttaaagattttatggatagatataaatagttttacttattttgtaaaatttaaaataccattaattaccttaaatattttaataggaggacatatgaatttaaataaagttaaatttactgaagaacatgctattgaagttactaattggaaatatgaaggtaaatattcaatatacaacctacctccatgggaggaaattaaaaagaagaatttttcactatcaaaagaagataaaagaaaaaattttataagttttataaatgacaataaagaattgataggttttataaacttattggatgaaggaagttatgtattctttggtattggtataaaaccagattattgtggaatgggaattggcaaagaaataattagcctaggattacaagaatgtagaaataaatatagtactaaaccaattgtattaaatgtaagaacctggaacatgagagctgtaaaatgttataagtctcaaggatttaaaatagttgagactcaggtacagaaaacgcatttaggggatggagaattttttgttatgaggtatcaatagtttataacactagtcatattgctaatatgacaattaaaatgaaaaaatacatgtgtgtatgtcatagcaataagtgtctttgaaatataaatttgagagcctttgataaaattcggtatacatatatattttatactacagatatataaatctatctacatacataaagagattgtaagtaggtttgtgtatataaaaataaatttatatttcataaatgtactttttatttgtattacctttattttatctaagctctcattttattacctaatcttcctttttattggttttattaagagagatgcaattatcaacacaacacttccaagtatcagccaatatttctcatcaaaactaccttgactcatagacattataaaaaattttccaacatacttgcctttagtcatcatatttaaaattaaatatcctatagatatcatgtaacctatgattgtattattaaataaatttgagaaaaacattcctaaacttcctataaacatagctgatgcgaaacttccaataatatactcaactactggaaaattacatccaagatatattaaaacatttacaaaacctatgattaataccactatacctataattgacatcagtatcctaattaattgtacaataacttgagataatgattttgaagatactatctcatcaatttcttttgattgctctagcgaaaatacaggtaccaacattactatccctattattgcaacataattttctaaacatatagctgttgaaattctgtctaaattagctactccttgtattagaggaatcatacatagcaatataattgaacatattaaattagttaaagtgcttaatttgaagttttcttttattagaactaaacagttttgaaaactttgcccaaacatcaagattcccccttcttttttgctcatataagaatatagctaacaaaacaagcaccaatgctcccaagcttatcacaattctattaatcataatttgattgaagttttgtataataatatccccatttaatacactattatgtcttatcattagccccattgttgaataatcacctttgagtcctgtagaatttatactgtaaagccaccaaattaattgcacaataattgctactggtgtatctgttaatatagtaatactcattcctacagctgtaactatcataagagttggtagtatccaccataatgtatattttataaatgctaagttatcaatagatatacctttatctttagcaaagaaaatcaaaggaagtaaatctttcatacctaaaattaatacaggcaatatcattataaagacaagtgcaaaatatcttgataaaactattttgcatgaagatacttgttttgaataaataatctctctcattcttgaacgcttatctttaagtgacataaaaactgccacaaatactggaaatatacttaaaactatacctatataatcgcaaaaaattcttgcatacccattactaactttatctttttgtattgtatagttgtaattcttcatagcttcatcataggtaactggaactactccaaatctttgtaacttgtcaaaagcatatgcagaccctcctcctaaaatgtcgtctactctttgcattatttcttcaaatctttcaagagatactttagaataatctatttttatactttcatcagttttccaaattaaatttatttcgctaatacttttaccagttatttcttctatatatttttctatggtcttcgttttattttggtctaattttatatacttaactacccctgttggatacgttgtatatgtgtttttttgatattctctaattaggtttatagttgcatttggaatgaccttttctgttttcatagattctttttgaccatatggatattgattgtgtacagagtaatattcgtcaatattctctactttttgtggagcaactaatggatttccatcattaggaatatttttacttacatcatttgaaactgaacttccaagttgagaaatatagaaaaaaactaaaactacaataaaaatataatataccatactctttaatatatttttacattcttttataaatagattcatatattatctcctcccattataagcatatagccatcttcaatagttggattacaatttactgctgtctcaaaaggtttatcatctgatataatcctaagtatagcctttccaccatgagtcaacattcctataactataaatctactttttatattttcaatgtcttttttatctacttcaatactatatactttcccttcagctagttttgctaatgcttctgttgagccattgtatatgacttttccactatccaatatagctacgttttcacatgtagcttctatatctccaacaatatgtgtagataaaataacgattctatcatttgcaatttcgcatagtaaatttctaaatcttatacgttcttctgggtcaagacctgctgtcggctcatccactattaaaactctgggattatgaattaatgcttgtgctatcccaagccttctattcatacctccagataaagattttactttcacattttgataattagtaaggtttactttgcttaataactttgctataatttttcttctttttcttagtggtatatccgataaaactgctaaataatccattgctttatatactgtcatgttaggatacattgaaaaatcttgtggcaaataaccaaccatatttctaatttccttagtattctcaataggaactccacacatatgtattgaaccttctgtttttgataataaagtggctaaaattctcataaatgtggtttttcctgctccatttcttcctaaaagaccaaacataccactgtcgatttcaagatttatattatcaagagcttgttttttcccaaatcttttactaagattggatactgctattttcatttccatatataaatacacccccagaaataattttatagaattttatttttataaatttttactgtattttcataataaattctaaaacttaagatattatttataaatttctaaattttttctaaagattttaatttttctgtttttaattaaattaaagtatctttgtttctgaaattttttaagtttatgaagctataatttaatatatatttattttatttgtgagtctatttttatatataatgaaaaatgtgataagtatccaaaagaattactggatataataagatagggtatttagccttttaagataaataaaaatatctgcaactatatattgcaaaaatttaaaactaatttatatatgctaatataaatatttataaagacataagacaaatttacctacagatttaaatttaacttatatattttaaaaggctaatataatatgtattttcttctatacaatcaaaaggcttcatatctaagatatgttatgacactaatattcacaattttttagtaattatcacattataaaaaatattacagctagtccatcatcagatgcttcttgtataaactttttaagctcaattagatttgcccatacatattcaaaaaaatcatcttcactctcatcattcataacaggataaatattattttctaacatctcattaatattaaatctttttctaaatgcttgttcttccaaactgttcattgcttttgatagtttttttacatcatttgctgtaatcaacatgacaggaaattctccatcaatttccataagtatgtttccacttagtactaatttgctaaatatattctcatcatctccaccaaaaggacaacctgtcaaagtaaagtgaatggcatgccatgctttatcaatattgatagtactattttcgttggcatcttcaaaaacaaaatcttgtaaattttcttctgcttgctgtaatttaaaaacattctcttcacttattttagtataacatcctatcatccccataattacattcctcctaagtagcgtttttttaattgtaacttataattaaacttagttacaataaaatatattgagaaaagtattatttcatcttaaatttaaatacctatattatcaactaaaattctgtgtttatagcgtaagtattattattttttcctaaaaattaaatgaatcagaagttctataggcaatattgactataaataagaactattacttttaaaaaaaatttaagaaattatactgtagaatcatgctctacttattagcttcaaataaaaaataaatcatgttctcaaattaaataataaataacaataaatttaaattttaaactataagagtttctgaagtgttaataagcataccaataattatatgtgtaagaatttgatttaatagatatgaataatttttacattaattataaatatattaacctattattataaattctataaaaagaaaagttatcttaaataaaaaataagtgtatcttaaattttaaatgatacacttatttttatattgaaattatattttttaatatctattcttaattaggtatttttaaattatctgtttacattaaatatctcttaattacttatctttcagctagcttcttctattaaatgtttctcaattacttatttttcaattagccacttctattaaacatttcttaattacttatttttcaattagccacttctattaaacatttcttaattacttatttttcaattagccacttctattaagcatttcttaattacttatttttcaattagtcacttccattaaacatttcttaattatttatttttcagttggctttttctattaaatgtttcttaattacttatctttcagttagctctttctattaaatatttctcaattacttatttttcaattagctactttcattaaatatttcttaattatttatctttaagttaactatttccattagatatttcttaattacctatttttatcatttattttatagagtattgtgcactatatatttatacatatcataaatactacaacttgttatctcttattttagctgttttatctactcctctattttttcaactatctcaaagtcaatttctttaaaatctacattaacactttcaacctttatcttaacaaggtctcctatcttatatgacttcttagttctttctcctaaaacactataagaactctcatcataaatatagtaatcatcattcatatttgcaagtcttatcaatccttctatagtattatctaactcaacaaatattccaaatgaagttacgctagatacaacaccctcaaattcttgaccaactttatccttcatataaagagccttatagaaatcatgtacatctctttcagctaactctgcctttctttctttctcggatgattgaacagatgcataatccactatagtagtaagctgttcttgtctttttccacttattttattatttaaagattcttttattattctatgaatttgaaggtcaggatatcttcttattggtgaagtaaagtgacagtagaatttagctgctaatccaaaatgtccactacattctggtgagtacttagcttgttttaaagaacgaagcattatagtactgatagctccttcttcttttttgccctttattttctctattataccttgtaatgcttttggatgtacttcctctttatcaccttttattatatatccaaatgtagatataaacttactcaattcttccattttttccaaagatggtgtctcatgtattctatacacaaacggtattcccatccagtaaaaatgttcggcaattgtctcattacttataagcataaattcttctattatcttattagatattcttctttcatatggctttatatctacaacttcgccttttccatttagaattatctttgcctctgggaaattgaagtctatagctcctcttttttctcttcttgacataagaatcttagctaaaatttcagcatttttaaaatcttcaacaacatgttcaaaagtctttttaagtttttcatcatccttttctaatatatcagatacttctgtataagtcattctagcttttgaatttattacagattcacatatttcatgtttaaccacatttcctttatggtctatttccataaatatagaaagagttaacttatcttcaaatggatttaagctacatactccatttgaaagagtttttggcaacattggaattactttatctactaaataaactgatgtagctctttttaaggcttccttatcaagtttatttttctctcttacataatgtgtaacatcagctatgtgaactcctagtttgaagtttccattaggtaatacttctattgatatggcatcatctaagtcttttgcgtcatctccatctatagtaaatatgtttaaatctcttaaatctcttcttctttttatctcttcttgaggaatctcaacagctacagcttctgcttcttgcaatactttctttggaaattcttctggaagaccatgttctcttattatagaatctatttctacgcctctttcacctttttgacctagtatctctataattttgccttctggttttctatcctcttgtggccatactgtaatttcacatactaccttatcattatctactgctccactaaaatgttttttaggtatatatatatctttagtaaatttcttgttgtctggtgttacaaatccaaaagttttacttgattggaaagtacctactattctagttatttctctctttattacttttactattcttccttctgctctcttttcttcagttgcaggtactactatttctgccataactctatcgttatgcatagcaccatttatattgtcacttgagataaataaatcctgtgtatattcaacatcagattctacaaatccaaaaccctttttgtgtgatacaaattttccaacaaagtatcccatttgattgggagatactatttttccttttttagtaaagcagatataaccatcttcttctaattcatttaaaaaattataaaacattggcatttctgatgaatgtatatcaaatatttctgctaattcttctttttttagaggattatatgcactttcatttattaatcctagcaaactttctttaagtcctggtatcatttttccctcctgttttacttttcattatattattatttatattgtcttttatatttcttcagataaaacattttttacttatcacataattttctatattttcttattattattacaagttaaaattacttatttatatttttgatttaatgtaagctttgtcatactaacttcaaacaaattatgatgttttataaattatttgtaaatatcattataattacttaagttattctttatcataattgcttaaattactctttatctcataattatacaccatcaaataggattggtaaaatattcatctcatataagtattactatataataatttattctattagtatactcaaatcatgtaaaatttatataactcaattaattttttaaatacaactttataatataaaacttataataaaagtaaatttatatgttaaatgaggttgattttttattattttttatttatgctagtactaaagacttgcaaacgttttttgacaagtctttattttgtctaaattaaacaaacttttttacaaataaatacataaaatttaaactaatctatttattggaggagataaaattggaagaagtaattgcaaaaattattactatagaaaatggattcaaagaaattgaaaacattgctaaaaaaattgtaaaaaataatgactcaaaaaagtgttattatctatcaatctacttatataggtcagaatattatcaagtaagagaattggctgtgtttatacttggttttatatcagtaactatttctgaagctttgttatttttaaaagacaatgtgagtaaagatgaaaactggagagtacaagaaatactagctaaatcatttgattattattgcagtgaagtaggatatgaaaaggcacttcctgttataaaagaatggcttaattctgatagtccaaacataaaaagggctgtgacagaaggtcttagaatttggactagtagagactattttaaatctaatcctgacgttgctatatcactactttctagtttaaaagaagatgatagcgaatacttgagaaagtctgtaggtaatgctcttagagatataagtaaaaaatatccagatttagtaaaaaaagaattagattcatgggatatatcaaataaaaaagttgagtttgtatataagcttgcttcaaaatgtatcttggcaaagtaaaatggaggtgaacttatttgaaacttcgtgatgagtatacttgcccattagaactaacacatgatatgataaaaggcaaatggaaatctattatattatggagattacgcataggaccaacctccttatcaaaacttgaaaaggaaatcaatggtattaatcaaaagatgttacttgaacaacttaaagaattaattgaatttggtcttgtagataaaaagacatataaaggttacccacttaaagttgaatactcacttacacctattcgagggaaacaaatattggatgctttggctataatgcaagatataggaattagctttatgttggataatggtatggaagatattcttaaggaaaaaggtgttttaaaataaatagatacccacaaaaaagtaagtaatttaccattattttcaactggtatataattaaattatagatatattctattaatttattataataggaggtaaattattatgaaagtaactagtacaggtatagtaaatggtgttatagaagataaatacggtaaaagaggaactcagttcaatgaaggtggtatgcctacatattcactacctctaaagtttgaagatgctccaaagaatacagtatcctttgctgtatttttagaagataaagactctgttcctgtatgtgggtttgcatggatacattggttagctgtaaatataacaaaagatgagttaaatgaaaatgaaagtgtaacagctactgattttgtacaagggactactagttggcatggcaaactaggaggtcttgacagattagaggccagtgtatatggtggaatggctcctccagacagacctcatgtctatgaaatacatgtatttgcacttgatactatccttgaccttgaaaaaggattctatatgaatgaatttttcaaagctattgaagggcatgttttagatacatttacactaaaaggaagctattctaattaattaggtttactatagctaatcattaattaaatgctacatttaattgatgattagcttaattgttattagaatattttctgcactttatcttaatatatattttagttgactggtattttaatttctattagattattatcaatttatataaattgattttagcttaaaacttacttatctatttcagtttctattagaattattattagactcattaaaataaaagcattaatataactaataatatatgttaaattcattaactctacataaagttttataatctaaatgaaatacaataatctgcataaaattcaatagcttatataaaatttagtaatttatataaatattatcaatctatataaaatttaataacttatataaatttaactaatttatataaaatcttaaggagttgccatgataaaaaaaatagagcatgtggtcattactaataataatatagaaaattatatcaatttttataaaaaatttggtttttcatctaaagaaatgagcgaaaagtataaacttaaggctagaaatgttaagataaatcttaacataaaaggttataaatttttaccttatgttaaaaatttaaaagcaagtagagataacttatgttttaaaataaacacaaatattgatgagccaaaaaaatacttagaacaaaatgagattcaaattaagcgaggaattgtagaatgtacaggtgtctttggtaatatgaaatctatttatttgaaaaaaactaatggaaatttaattgaattatcaaatcatagaatcacggagagtaaaccttggaaaatttaatcctatcaataaatgttgttcttcctttgtttctcacaatgtcacttggatatgttctaaaaaaattaggtctatttgatactcatactttaaataaaatgaataatgtctgcttcaagtctttcttgccattattattattttttaatatatacaatacagatttagatggttctcttaattttaagcttatggctgtagctgttataattattttttcaatcttcttaatcttagtctttattattcctaaaattgaaaaagataataagacaaggggtgcattaatacaaggtgtatttcgtagcaatttcgttatatttggtattcctgtgacaatttcactatttggcgataagagtattggagtcacatctttattaattgcagttattgtacctatgtttaatgtattatctgttgtaattcttgaaatttttagaggtggcaaagtaaatataagacatatgattaaaagcgtcttaacaaatccactcataatcgcctcttttataggattgacaatgctaattttaaatattaatatacctacatttttacacaaaactattggtgatatttctaaaatagctactcctttatcacttataattctaggcggatcttttagtttttctgctataaaggggcatataaaaaccattatattgggcgtatgtggaaaacttatacttgtaccttctatatttttaccaattagcatttttcttggatttagaaatgtagaattaacttcacttatgataatgttatctgctccaactgcagtttcttcatttacaatggcacaacagatggattctgacagtgaattagctggacaaattgtagtatttacttctggattttctataattacagtatttttaataatatttattttaaagcagaataatcttatttaatgatatttgataacacaaattggtattatgagaaacatatataaaattgatttaattgcgtaaaaacatattattatactatttttactatataatataactttgtgtatattatctcattaaacatggtgaaagtagtgttgctatatattttttagtttgaaaaaaatatataaatataaacaatatataaatacaaataataaatgccaacaaatagtcaatctataaaataaaaactggactaatcatataaaatcattagtccagcttttattttacgtactttttatgttgatgtacttttattaaaaactaaatttaatttttaaatatctagcaaatgcactaattaaataatggccagttattcaacaatatcactacttcttaactataagtaatgccaatgcatttataaaaaataatactgctgttatctttgtaactctagcaagaaatgcttgttttccttttggtttaaagtaagcttgacttccttctccaccaaattctgaaggtaaagcattttttgaatcttgaggcattatgctaattactagtaaaatccctagcactacttgcacacccattaaaatgttgctcattattgcccctcctatctatttattacttaaatttcattactctttagtgtatcacaataatatagtcatttcaagactattgaagtataaataacaaacaaaaataatatgcaattactatatcttttttgaataacgtacttctaataatttttttccaatatgtatctctttctcaaaatcatcacaagtaaaaccattttttttatagaaatttatagctctagtattgtcttttagaacccatatcgttatatatgaatatcctaaattgcttaatctatcaatgcaaaattgtaatcctttttttgtcacagatgttccccaaaaatcgggatggaaatatatagaatatatttctccaacacattttggagcattatcctcttgacttctatttaatgaagcaaaaccagcaggtataccattcactttaaaaagataatattcctcttcagcttttggaataacactttgaaaaacttctgctcttttctcagaagtgaattcatctattatcttatctggaataattcctttatacgcttttctccacgaacaagaatgtataaaacccatttctatagcattttcacttgtagctcgtataatctctaaattcataaaaacaccatcctattgacaaattaatacgattatcgtactatattagtgcgataattgtatcatatatggaggtaaaagtcaatgaatcctgtaaaagagctaaacaacctgtggcatattgttagtatgcagatgaaaacagaaatgtgtagtggtaagtatcctactattcatggtatttctttagtagaattaagtattttagaaatagttgaacagtatcccaatagtatgatgaaagaaattagtgaaattttagaattgccaaaaagcacattaacaagtgctgtaaaacgtcttgaattaaaaaaatttattaaaaagaatccctgtattaaagacaaaaggaggtataacttagtcttaactgaattaggtttaaaggctcaacaagaacatagagacatagaaataattgtatttagaaatctcttacatcaattagataaagatgaaatagaaacttttattcgtattttttctaaagctgtgaataaaagtaagaaatgaaatataaaaaaaggataagtgaattgaaaaatcaactatcacttatcccttataagataaatttttatcttttatgttatctttttaatctttaatgccatatttttaatcttcaataactatttttttaaattatagaaagattttaatccacagtatctagcttgttctccaaccatttcttctattcttaataattggttgtacttagcaactctatcagttcttgatggagcaccagtttttatttgaccagcatttactgcaacagctaaatctgctatagtagaatcttcagtttctcctgatctgtgagatataacagcagtatatcctgctctcttagccatttctatagcatctaaagtttcagttattgtacctatttgattaactttaactaatatagagttagctactccattttcaattcctttttctaatctctctgtgttagtaacaaataagtcgtcaccaactaattgtaatttatttcctaatctttcagttaataacttccatccgtcccaatcttcttcgtctaaaccatcttctatagttattattgggaagttgtttgaccaatcttcatataaagcaaccatttcagcagcagttaactcttttccttctcctgctaaaacgtattttttagtttctttgttgtacatttctgtagcagcaacgtcaagtcctaacataacatcttcacctggcttatatccagcttttgttatagcttcaactattaattctaaagcttctctgtttgaacctaagtttggagcaaatccaccttcgtcaccaacaccacaagctaatcctttttctcctaaaactttctttaatgaatggaatacttctgctcccattcttaaaccttctttaaagcaacaagctcctactggtaatatcatgaactcttgaacatcaacgttattatcagcatgctctccaccgtttaatatgttcatcattggaacaggtaattgtttagcatttactccacctaaatattggaataatggtaaacctatttcatcagcagctgctctagctactgccattgaaacacctaatatagcattagctcctaatttacctttgtttggagttccatctaattctatcatgattgcatctatagctggttggtcaaatgcatccattccttctatttcaggtgctattatttcatttacgttagcaacagctgtttctacaccttttcctaagtatcttcccttatctccatctcttaattcaacagcttcaaaagctcctgtagatgctcctgatggaactattgctcttcccattgctccatcttctaatactacttcaacttctacagttggatttcctcttgagtctaatacttctctagcatatactaattcaataactgacatttgtatatctcccttcgattttctattagttaaattttcatttactgtaaacatccgtctactattttaatctactttctatattatagtacataaagttgcttttgaaaattaggtacaaatttatttgatgggtaaatttgtaaaagttcctatttttattttattttttataatattttaatttatataatataaaaaaacttgtctaaaatccaaaaccaatcttaaatacacaaatattataactagatttaaaacattaaacataaaatgtacaactaatgattctaaaatttttgcttatataatatatattaattattattatttatattgttattgtctatcttgttattatttatatcattatttacattattatctatattataattttttattttataaattgtctatcttgtaaattttataaaatataccttcatctacaccttacaatatccagaacttacaaaatctaaatcttatgtcataaagtctaaactttacaaaataaacctaaactgcattatttttaaatttatattgtagtttatatattattctctacttatcagaatcgactattttgaaataagtgaatgaccagtcatttcttctggcttttctaacttcatcatatctaaaacagtcggtgctatatcagataatcttcctccatccaataattttgcactttcatattcttgaccaactacaataaatggtactggattaatagagtgagccgttacagtttttcctgtttccgggtctaacatatattcagcatttccgtggtcagcagttattattgcacttccacctaactctactattttatctatcaattttcctacacaagtatctacagtttcaacagcctttatagccgcttctatacttcctgtgtgacctaccatatcaggatttgcaaagtttaatactataaagtcaaacttatcttctcctaatttatctaaagctttatctgtcaattcatatgctgacatttctggttttaaatcataagttgcaacctttggagaaggtatcaatagtctttcttcacctttatttggctcttctactccaccattgaagaagaaagttacatgtgcatacttttcagtttcagcagctctaagttgagtttttccatttttagctagatactcacctaaagtgttggctaaagattgaggtccaaatgctatatgcacattctctatagttatatcgtactctgttaagcatacaaagaagtttttaatatcttctcttttaaatccatcaaactcttcacaaactaaagctctagttatttgtctagctctatctggtctaaagttgaagaatataattgaatcattttcctttatacttccaactggtttatcatctttcataataactgttggcattataaactcatcattttttccatcatcataagagttttgaatagcttcctcaatagaatttgctttttcaccaatacctctaaccatggcattgtatgcaagttctactctttcccatctcttatctctatccatagcgtagtatctaccagaaactgtagcaaattcacctactccaatttcatccatactagcttgtacttctttggcatattctaatgcactttgagggtcagtatctctaccatcagtaaatgcgtgaacatacaccttttgtacgcctttatcttttgccattttgattatagccttaagatggtctatatgtgaatgtactcctccatcagacaaaagtcccattacatgaagagaattttcttttgcattatccattgcttcacataaaactttattagcaaaaaagtcaccatcttttatagattttgttattctagttaaatcttgatatactattctacctgcacctatgttagtgtgtccaacttctgaatttcccatttgaccatcaggtagaccaacatcaagaccactagcatttatcaatgtgtttggatactctttttttattctatctaaattaggagttttggactcagcaattgcatttcccttaacatccttattgtatccaaacccgtccataataattaaagcaactggttttttcatcatttcactccttagaaattaacaaggtctaggtaatcattactagctaaactagctccacctactaaagctccatctatatcactttgacccattatttcggctacatttgaaggtttaacacttccaccgtattgtattctaacttcattagctaattctccatataatccttttataacttctcttatataagatataacgtcattagcatcttcagcagttgcagttttaccagttccaatagcccagattggctcatatgcaacaactacttttgataaatcatctttaagaacattttctaaagctttttcaacttgaactttacaaacatctttagtttttccagcttctctttgttctaaagtttctccaacacataatattgggtctattcctacttctaatgcttttaaaactttcttgtttacagtttcatcagtttcattgaagtattgtcttctttctgaatgtcctattacaacatagtccatatctatttcttttaacataagaggtgaaacttctcctgtaaatgctcctttttcttcaaagtgcatattttgagcacctatctttatatttgtacccttagtagcttcttttaaatcctttaataaagtaaatggtgcacatataacagcttctactttatcagaatttactttatctttaacttcatttacaaattctaaagcttcttttattgttttatgcattttccagtttcctgcaattataggttttctcattttacaatctcctctatatattagtttatttattatctaatgctgcaatacctggtaattctttaccttctaaaaattctagtgatgctcctccacctgttgatacgtgagtcatcttgtcaccaaatcctaattgattaactgctgctgcactatctccaccgccaattacagtagttgcatcagtcaactctgccatagctctagctactgataatgtaccatttgcaaagttttcaaattcaaatactcccattggcccattccatactacagtttttgattcttttatagtttttacaaagtttgctatagtcttaggtcccatatctagtcccatgtaatcttcttttacattagcatcttctgttactattggagtagcatctggtgcaaagtggtctgccataacaacgtctactggtaataataagttaacacccttattattagctttttccatcatttctttagcatattcaactttatctatttcaagtaaagaagttcctacttcataaccctgagcttttaagaatgtataagccattcctccacctattattagattatcaactttttctaataattcgtttataacagctaatttatcagaaactttagctcctccaagtatagctgtaaatggtcttacagggtttgcaacagcttctcctaagaattttaattctttttgaattaagtatccacaaactctctcttgtaaaaactcgcctgcaccaactgttgagcaatgtgctctatgagcagttccaaatgcatcatttacaaatatttcagcaagtgatgctagttctttagagaaattctcttcgtttttagtttcttcttttctatatctagtattttctaataatactacatctccgttttccattttttcagttgctttctttgcattttctcctacaacattatcgtctgctgcaaatacaacttcttttcctaacatctcagataatctctttgctactggtgctaaagataattctggtttagcttctccttttggctttcctaagtgagagcataatataacttttgcccctttagaaattaaatattgaatagttggtaaagctccgttcaatctattttcatcagtaattacaccatcttgtaatggcacattaaagtcacatcttactaatactttttttccgcacacatcaatatcttctatagtttttttgttaagcattgacataaatatctctccttttaataaagtaattttttattgccaagtataatatagtacatacttttaccctattaaatatatcatattatcatatttttatatatagtatgtaacattatttaggtgtattttatatattttttcttaaaaaaagtcctgagtccgtagtattaaactacaaactcggactttgtcaatctacttttctattttctcaaaactgactattttgctaattgtgcaaagtatcctaaagttcttattaattgagaagtataagacatttcattatcataccaagaaacaactttaactaattgttttccatctacttccataacttttgtttgagtagcgtcaaataatgaaccgtagcttattccgattatgtcagaagatactaacatttcttcagtatatccgaaagattcgtttgaagcttctttcatagctgcatttatttcttcaactgtaacattttttcctaatgtacaaactaattcagttattgaaccagttacaactggtactctttgtgctgccccatctaattttccttttaatgaaggtattactaagcctattgcttttgcagctcctgtagtgtttggaactatgtttccagcagcagctctagctcttcttaaatcaccttttggatgaggaccatctaaagtattttggtcattagtgtatgcatgtatagtagtcattaatcctttttctataccgtatttatcatttaatactttagccattggagctaaacagttagtagtacaagaagctcctgatataactgtttcagaaccatctaatatgtcactgtttgtgttgaatactattgtttttaaatctccagtagctggtgcagatataacaactttcttagcccctgcttgtatatgagcttcagctttatctttagatgtaaagaatcctgtacattctaatactatatctactcctaattcagcccatggtaggtcagcaggatttctttctgctgttacttttatttcttttccgtttactacaaaagcaccttctttaacttctatttctccgttaaatcttccttgagctgtatcatatttaaataaatgagctaacattttagcgtctgttaagtcgtttattgcaacaacttcgaacttatcttgttgctccatcatttttcttaatgctaatcttcctattcttccaaatccatttatagctactttaaccattttcgctacctcctataaagtaaatgtatgttttctagctctgtgctaggtcttgacttttataataatgacaatatcttataagcactttcttcatctgttacaagaaccatgtttttatgcatatttgatatagctaataaggcttctactttttcagtccctgcaaagattgcaatagtttcttttacttgtttaactgtttctaaatcaattccaacagtgttcagtttgtaaactatttctccatctttgttgaaataatatccaaatgcttctccaactgcatttttagataatatctcatcaaccttgtcttctggaagttttcttctctttgccatgacatctgctctacctatactaaaaactaaaatgtctgttcttttaatatactccaaagttgtcttaatctctggcacttggctaagagttttcattgcactttcatccaactcatctggtatatgtaaaagtttgcaattagaatgtaatttcttacttattgaagcaactatattgttagattgcatctctacatcagttcccatacttcctctagctggaactattgtagagtttggatatctcttatcagttttaataacgtttgaaaactccaacatagtgcttcctcctgttattgaaacgatatctccatcttttaaaatgcctaagaaatactcgcatccatatctagttacatcttttagtaaacttccattttcatcacagcttccaggaactagtattaccctttttattccaagcttttctctgactctatcttgtaacttagacaatcccatgatgtcactcatgatgtccttaagtttatctaacaaatcagaaccttctttagtgatagtcatcccagatacagctacgtctataagtccttgttcttttaaaaactcagtttctgacctgattattctttcactaatctctaatacatttgataatgttctcctacctattggttcacttaaagatatttgtcttaaaatagagtatcttctttccataagttcaattgcctgtggaatcaatttcttttgaatttctaataagttcttcataacatactccttattgctttcctttcgggactttttttgtccctagtgtttatttaagtcccacaagatatttttattttataggatttgcgtatagatttcaatagtttttcaaaaacttttttatttttttattttataaaatatttctccaccattttcaaatcacagtattttttctttttatataaggctttttatatatatttttttatattttcattctaatatttattactataaataattttatttctagttacttttatttctagttatttttatctacaactaagtttacttttatctagttaagatttttatttataccctacgtgttttccttttgtgattattaaatttaataatagtttatttatctaggtattcttctttttctaatatctaattattctttacaaacacttatttaatttaatcattctttataagcacttatttaattatgttttctagttttttagcattttacaatattttaatgttccccagtttttcaattctttttagtatttttatattttataaattttaatattctttaaagttctaatattcctcaaagcctaatgttctttaatgttttaatcttctttagttttttatgttctttgctatcttaatgttttaatgttccccagttttttaataccttatagcattttaatacttttccatattctattattttactttataaaatttttagcccaatctacattcatctcttaattagccttttccccttaccatactgatatttgtcttttacttattagtattcttttctcttacttgaagatgggattcctaattcttcacgatatttggcaactgtccttcttgcaacattgattcctttttcttttaataacttagatatatggtcatcacttaaaggtttctttttattttcgtcttttattgtttcctttataattttttttatgcttgtactagatgccatttcattattctcagtctcaatggcgctactgaaaaagtacctaaattcatatacgccaaaaggtgttagcatatatttaccatttacacctctacttatagtagattcatgaaattctaatttttctgctatgtctttcattttcaaaggttttatatattttgtcccttttctcaaaaattcatcttgagcttttactatctcttctgcaatcttaagtactgtagttttcctactctctatatttttcataagtcctgttgctgaatttagtctttcttttataaattcttttgcactttcatcagactgtgaattttttaatatgtctttataataactattgattcttatttggtaagaatctttctcatttaaatatacaataaattcatcatcaatcttttctactgttacatcaggttgaatgtatacacttttctctactgaacaagttcttcctggtttggggtctaatgtcttaattatgtttattagttcaacacatttttgtaatgacatattgtactttttacttatctctttatatttattatttgcaattaaatttaagtcttttgtaacgatttcctctaaaatttcattatatattcctaaactagccatttgtatcatcagacattctgaaagacttcttgcccctactccactaggttccaactgctgaacactaattaaacatttttcaaaaagttcttcatctatctttaaggtatcaacaattactttttcctcagttcttaaatatccatcctcatctaaactatcaattatatactcacagacttccaattctttgtctgtaagtttatacaggcttatctgaaattttaaatcttcatataaatttgacgaatatttaactaaattttctagattaacttcattatcaggattatagcttatctctgttctatctaaacgtcttgacctatccatgtcttttatatactcttcccaatttatctccccacttttctcgacttcaactaatgggttattctctgcttctctttttatctcttcttctaactctaacttactcatatttaatattgataatgattgcttaagttgtgtagtcattattagcttctgagactgagttaattctagactattattaaaattcattctgctcacctctcaattttattaaacttattttataaaagaaaaaccctcctgtatatgtatattctatcatttaaaatataccttatgcaaaagggttttttttatttacaatttcatctatttttttatttaatatttcttttttttgttacttttttttactatatggagtattttgtagtggtagctcagttctaaattctttatcaaatacataataggcattttgtactgctggtgcagtaggaactgtacaaatttctcctacaccttttgccccataagccaataaatctttgttcttttcaactattaaagcttgtatttctggtatatctgtagatttaaataaacctaatgtaccaaacttagctgtaggaacagagttaactactgggtaatcttcggttagagcatatccaagacccataactactccaccttctatttgaccttctaaactgattggatttatagctcttccaacatcatgtgctgctactactttttctagttttccattttcatccagaattacaacttgtgttgcatatccataagcaacatgacttactggattttctttgtcacaacccattttatctgtaatactttcatattctccataaaactcttctccctctaaatcaagtaaagttttgccagagtctaaagcttcttttaacttatttgatgcaaccttagtagcttctcccgtaaatactgtctgtcttgaagccgtagtattaccagagtctggtgttaaatgagtatctggaacttcatgcactatattttcaggaagtaggctagcagtttcacaaactacttgagtcataacagtaccaagcccttgacctatacaagaagcacttgttcttatgtgaactttgccatcttttatcaccaatctacatcttccaacatcaggtataccaactccaaccccactatttttcatagcacaagctatacctgcacgtggatgcttttcatactcttcttttacagcttctagtgtctctgccattgctgttccttcatctgcaaattgaccatttggtaaaacttgcccaggtcttattgcatttttatatcttatctcccaaggagatattccaaccatttcagcaagtaaatttagattacattcagttgcaaaacaactctgtgtaactccaaatcctctaaatgctcctccaggagggttattagtatatactgctgttcctgttatatcaatatcttgataattgtatggtcctgctgcatgagtacacagtctttgtagcactggtcctccaagagaggcatatgcacctgtgtcagatattatcgttgccttcatacccgttaagtatccattttcatcacatgctgtcgtaaattccatttctgtggcatgtcgttttggatgaacaataatactttcttttcttgttaactgtacttttacaaatctctttgtatggtatgcaagtaaggctgcatggtgttgaacactcatgtcttcttttccaccaaaccctcctcctaccattttgtttataactcttaccttctcatatggtaaccctaacatatctgcacattcatgttgagtggcaaacaccccttggtctgttgaatagattattactccatcatcttcataaggaccagctactgcacattcaggctctaaaaatgcgtgttctgtagcaggtgtagtatatcttttagttacaacatattttgaattttctatcttttctttagcgtttcctcttactaaatgttccttaacaagtatattccctgtctcatgtatctttggagcatcttctctaagtgcatctgctgtagtacttaatggtgttaattcctcataatctatcttaactagctttttggcctcttctaacgcttctctagtttctgctgctactaaaactattccatctcctaaatatctagttatttcaccttctggtattaaagtatcccaatccttctttaagtgccctacctttatagttcctggaatatctttagctgttagaactgcaacaactcctggataagcttttgcttcttctatatctatttttttaactaaagctctaggatacttagctctaactgctgaaccataaatcataccctcaattctcatatcatctacatattcagaatatccaagtgctttgccaactgcatcaactctaggaagattttcacctactagacccttacagtttacttttggcacatctatattttctctaaaaatctttgctgctaaatcgacagctttaattatttttacataccctgtacatctacatatattaccttttaaagctttctttatatcatcttcagtaggattattattaacatctataagtgcttttgaactaattaccatacctggaatacaaaatccacattgtacagctccttgactagcaaaagaatatgcaaaaacatctctttctctctctgataatccctctatagttgttatgtttttcccagctaatttatcagttttaaatacacatgctttagtagctttaccatctattataaccatacatgttccacaagcaccttctgaacagccatttttaactgaagttatattcatatcttctctaaggaagtctaaaagttttttgccttcttttgcaacaactttctctccatttaatataaattctaccattctctagccccctttgttagacgcctatttatatatctcccacttggagtattacaaattaattctccatctctaactacttcttttcctcttaaataaacatgttctatttgacaatccacttcatacccttcataaggtgtataatctacattttgtaattgtttttttgcttctattttggattttttgtttggatttaagactaatatatctgcatcactgcctatttctatagttcctttattaggatacattccaaacaactttgctgcattagttgatgttacttctaccatcttgttgatagatattttatttttacagactccatatgtgtataaaagactcatcctatgttctacacctggagaaccatttggtatcttactgaaatcgtttatcccaagttccttctgtcccttataattaaaagaacaatggtctgttcctatagtgtctatttgattatctaaaatagcattccataatatttcattattttctttatttcttaaaggtggtgacattacatacttagcactttcaaatccatctaaatcatataattcatcatttaatagaaggtattgaggacaagtttcaactattacatccacacctctttgcttagcttttaaaacctcctctaaggattctttacagcttaagtgaactacatatacttttgagtttgcaacttcagctatcttcataagtcttgatgtagcttctgcctccattatagctggtctagttaattgatgatattttggagataaattattttctgactttgctttatccacaagttcacatattatgtccccattttcacaatggaaaccaataatccctcctatctcttctgcttttctcaatgcttcaaagattacaccatcatcaacttgaaggcttcctttatacgccatatacagtttaaatgaagatactccctctttcaccatatcctccatttcattacaaaccgagtcattccaatctgttatagccatatgaaagccataatctgaataggatttatccttagctttttcatgccattcttctaatccgtctttcaaagaacatcctttagcttgtgtagcaaaatccaatatagtagtagttcctcctactatagcagcttttgttcctgtctcaaagttatctgctgtcttagtaacgcctgtatctaagtcaaagtgtgtgtgtgtatctatacctcctggtataacataagaatcactaacatcaactatttcatcattttcttttgatatatcaagacctatatcgactattttttcatcttctattcttacatctgcacagtaagttttttcacttgttactactttcccaccttttaaaacaattcccatatagactccaccttacttgtaatgtatcaatttattttatatgaaaaaattaacttaaagtaatctagttagttcacttatacgtagtaaatctatattaagattaaaccaatacctaattaaattaatattcagctaaactaatatttagttaaatcaatataataaaattattaactttagactgtattattaatgcataatgtgtgtttgtttatctgatatattttattatcctaatacctattactctaagttaattaccaaaattctatataattattactcattcatagcttctacttgattgtagcagatgcttaaagctccttttggacatctagttacacataatccacatccaaaacacttgtctgcatctatgttcaacttatctgtaacttctaaagcttcgtatacacagcttgttacacattgcttacatttgatgcacttgttatcatccactactggagctactgaatgagttctaaaccctctagctgccattttcttatgagttaatccttttatttcattaacatcagcatatccattctcatctaaaaattcatttaattctttagcaatttttccatagatagaaggccctttaaggattgcttctgtacatacttgaacagcacttgctccagccatcatcatttcagccacgtcttttccacaagtgattccaccaacaccgattattggtatatttacaacttgagaagcttcatatatacatcttattgctagaggtcttattggtgcacctgataaccatccgtatccagctttacttcccattatagggtatcctgtatttacatctattgccatacatggtccaaatgagtttatcattacaagtccatctgcacctgcttcttcaacagcttttgcaatagtttgaatgtcagtatgaggactcattttcataaatactggtacatctaaaacagcttttgcagcttttaaagcatttactattggtgcaacgtctgtacctacataatgagtagataattcaactgcatctgcataaggctttactaaaggagcaacctcagctatttgctctgctgaatatcccatacttactattactggaagccctgtttcttttacctttttgtattcttcctctatccattgctcttttggaagctctgaccataattctgtgtttaaaaaaccactattagtttttgccatacatggtcttggtacatcagctggtaatacagatatagtttttgtacatatagctcctgctccaccttttgctgcctcttgacagagagcaccatcttttgctccaggtcctgccgctgtcataattgggtttaaaaattccattccatataaattaacttttaaattagccatattattatctctcccttaaattaaatatttttaatatttagattgtattcttttatttgtattcgttatttatttacttttttatattatttaaaatataagatagttttgttgaattattaatatctctgaattatttttattaatgcttaatgactttaagtcaatatagatttttacttgttttatttttattttgcttcttcaactttattatttttttcttttttagaacctagttcattgaagaatatgtttaaaagcactgctgataaactacctgttgttattccactatggaatattgtttgtacccaagttgggaaattatgatagaaatcgggatttgttagtggtatcatagacaaaccaacactaactgctactataaccccatttttagttccatcaaatttcactttgcttaaagtttttactcctccaaccattaccattccaaacattgcaaatcctacgcctccgagaacaggcttaggtattgctcctattattgctgcaaattttggtaagaatccaagtactagcaatataacccctgcgtaaactgctataaatcttgattttatacctgtaagacctactattcctgtattttgaccaaatggagttattggaaatgaattgaatattccagataatgctgtagatattccatctccaaatagacctcttttaatatttttacctgttacttctttgtctaccatttcatgaatagctatcatattaccaactgattccgtcataagtaccaacataatcaaacacaatgatagtattgcagatggttcaaatctaggcattccaaattttaaaggtacatttaagttaagccaaccaactccatttactgcactaaaatctgccattccaactgccatggaaagtagtgtaccaagtactatacctaccaatatagctgtgctattccaaattccttttaagaatttaaatgaaagtaaagttattgccaatactgctaaagctaatgctaatgagtttggttcaaccgcttccaatttgttgtcagttatccattttatcccaactggaaatagtgaaatacctattaccataacaactgttccagtaactacactagggaaaaatcttattaatttttcaaatactggagcaagtaatatacaaaacaatccagctactattacagagccaaatactgtctgtattgcaacttgtgaatcactatatgatgaggctattgctgtcatacctgccacagcggcaaaactagttccttctattactggtattttagcacctacaatatttcctataccaacactttgtatgagtgttcctatacctgccataaacaagcaagcatttattaaaaaaacaatactagcatgatctagtcgtgcagcacttcctatcatcataggaactgctactgctcctgcacacattgctaaaacgtgctgtagtgaaaatacccaagatttggatacaggtaacctttcatctactggagctattttagggcttttatcttgagacattttgggtctcccttctatatttaatttaatattctattccgtatattttttatttatatacttcatttaaattcctatttttgtttaagctctgtttttaacatctaaattcttgtttcttacttgtatattaatctgaacctcccatgactaaagtcacagggttcctgcttcatagaattttgcataatcaattatttaaattctattccatagattttgacttaattctctactttttgctagaatactttcttcatctatgtttattaactttctatctttcataagtacttttccatttataatagttgtatctacgcttcttccactcattccaaaaatagtgtgtccccctattgtattttctgtcaatggagtatgtggtatataatcaactactataacatctgcataagcaccttttttaagtactcctaggtcatttttataataagctttagctatttttctattgttatcaaataacattgtttgtgattcttcaaatccaactcttgggtcttttaagtgatgtttgtgaattatattggcaacttttaatgattcaaacatatcgctagtatatccatcagttcctaatcctactgtaactcccctttttaataactctattgcaggagaacatccaactgcatttcccatattagattctggattatgaactacaaatgtatttgttttatttaaaagactgatttcttctgcacttatatatatacaatgaactgctattgttttttcttttagtactccaaaatcattgaatctttctaaaaccctttttccatatttatctacattatattgtaagtctgctagtccttcagcaacatgtacatggtaacctgtatcaagaccagccatctctgaagcacatttatttaatgtatcatcagatagtgtaaatgcagcatgaagcccaaacattccttttatcatgtctgtatcatctttttgagcgtattttataaagtttacgttttcattgataccttgttggattgtatttccaccatctctatcagacacttcataacaaagacacgttctaattcccaaatcctttgcaacatctgatattgtaaacaaactgccttcaattgcatttggacttgcatgatggtcataaactgttgttacaccattttttatgcattctatatacgttgcatatgcactgtattttgtatcttccagtgtaagctgtttgtcaagtctccaccataaattatttagtatctctaaaaagttctcagaaggttttcctggaactgccattcctctagcaaatgagctgtatatatgcatatgtgaatttattagacccggcatgattattttcttgcctgcatctataaattcatgtactggatatttagctttcatttcttctgtagtacctatatcttcaattagattatcatttattactacacatccatcttccatatagggatttaaagaatcttggcttattagcctcccattccccactaaaatcataaatttattcctccttaaagctaagatttaatttttaagtacttttcctgctttaattttattgtattttccttcttcaacaacacaatttccatttataattacgtaatctatacctgtagggtactgcatagagttgataaaatcatcacaaccactaactgtatccttgtcaaatataactatatctgcaaaatatccttcttttaattcgcctctatcttttatactaaagcttgtagctgcctttttagtcattttataaacagcttcttcaattgttagtacattcaactctctaacatatcttcctagtattttagggaaagaaccataagctcttggatgtggtttacctgctaaaagaccatctgtacacacattttgctcgtctcttttcatgaatcctattatatgttcttctaatccatagaaatctaccatcccaactgcattttcttcttcttttaataaatcaaacgttgcatctaatgggtcttttcctctcatttttccaatttctaataagctcttaccaattgtatctttattcttttctgtttttacgcttgttacaaatatttggtctattccagcaaattctataaaattatcccagccttctattccatttgctatatcttttttcatttttgctctttcgttttcatcgcttaatctttctattaacttatcagttcctccagaatgtgcccaaggaggtaaaactactccaagcattgtacttcctgctgcatatggatattggtcaaaagatactcttattccttccttttctgctttttctaaaagctctataacttgtggtatatacttccagtttgctttaccacaaaccttaaaatgtgaaaaatgaacttttactcctgattgttttccaatttctatgatttcttccattgaagttaaaattgtatctgcttcacttctttggtgaactacaaatactccgtcatattttgctactaccttacacatctctataatttcttcagtcaatgagtatgcacaaggtatatatataagtccagtagacaatcctatagctcctgcttttaattctctctctgtgatttcacacattttttgaatttcttctttagtagcaggtctatcttcaagtcccatagcttccattctaacgtttccatgaggtactaaataagtttcatttaaacctaccccattgtaatccatcatttttaaataattctctgttgtttcatatttccaatcaatttcatcactttcaccatctagacctgctaaattttttctccaagaagatatatgctcttgaggtagaggggccatagatataccatcttggcccaacacttctgttgtaattccctgtctaatctttacctcattatatggattaactaaaataactaggtctgaatggctatgagtatctatgaaacctggacatataactctaccttttgcatctataactttgtcagcttcttcgtttaaatcttgtgatatttttaatattttctcgttttctattaaaatatctccttcatatgctggtgttttatttccatctactataagcccatgttttattaaagttctcacaaaaccatctcctaattattttttataaactgattttaatataccataatatccttctgcacctttgaataattggtctaattctatatactcatctattgtatgagcaagattttccttagaaggaccaaatcctatagttcttattccagcctcacctgcgtagtgacttccattcgtacagaatgagtattgagttatttctgaatctattccagcttcttttaatccattatacgctgcttgaacaaattcatcttcttcatcatataaccaacctgggaagaatctttcactttctatagtatttcctgtatagcaatcagctttttcaactgcataagaaacttttgcatttaattctgggtcttctttcatcatttcatctaataaagcttgtattggagctaatacgccttctcttgtttctccaactaataatcttctatcaaaagtagctttgcaataatctggcactactgatgctcctggatatggagaagattttatatctgttaaaactaatattccatcacctaaaactggatgagttggaggtactaattgttgtatcttttggattacattagccattttataaactgcatttatacctttttctggattagcagagtgagctggtttaccaaaagtttctactactatttctcctctacctctttgacctatctttaagtttaattctgaagattcacctattacaacataatcaggttgaacagccttacttatctctctagctgaaacaccttcaaatatttcttcatgaacaacacctgctacatacaattcaccttcaaagtctttgttagtatcttctgcaaagtatgaaacagcagccatcatagcacttacttgccccttcatatcagaagttcctctaccatatattttcccatctactattctcgcttcaaaaggaggaacactccatttacttgcatctggaactggaactgtatctatatgcccgtcaaataatatttttttacctggtttatttccttttatacatcctactatatttccatatctatctcttgaccaactatcaaaacctagtaaagcaaaattttcttctatagcttttactacgttttcttcttgacctgaataactagcatttcttattaagtcttggcatacttcagttaattgtttttttcttgtttcatttaacattttgatattcccccatataatttttaatttgttgacgttttattttgatatttcacttttttaatttattagcatttcacttaatctattgattttttatttctttatattttatttattaaatttttatttagactttattttaattttatttggttttatttaattttatttagtttttattttgaatttttcatttgctttactttttcatttatttagatttttcatttgttttagtttttattttatttaaagttttcacttatttaagtttttattttccttaaatttttcatttatttgttaagtttttattttccttaagtcttttatttactttggcattcaccattccaaactatatctctatatttatcagggtcagtatctccttctgtacttattaataatactttagagttctcatctagtttcaaagcttctcttaagtcttttaaatcttcactttcaaggattgaaactaatgctccagttgtaactgctccagattctccagagattactttctcatctcctcttagagggtttcctaatattctcatacctttagcagatacccagtctggtgctgaaacgaatgctgatgaataattttttaacacttcaaaacctatagtgtttggttctccacaagcaagccctgccattatagttggcatatctcctccaacaaatcttggttttccatctccagcttctgctgatttatagtaacaatcagcctcatcagcctctactactactgttattgggcattcatcatatattgaagcaacatacccttgaactgcaccagcaagtgaaccaactcctgcttgaacaaatacgtgtgttggtctatctactccatattcttttaattgttctatagcttctttagccatagttccatatccttgcattatccatgctggtatttcttcatatccgtcccatgctgtatcttgaaccattactccatggtcatcagcttctgcataatcattagctaatcttactgcatcatcatagtttaagtctgttatactagcatctgcaccttctcctttgattttatttaatctaaattcagaagaaccttttggcattaatacaacagatttttgacctaatttattagctgtccaagcaactcctctaccatgatttccatctgtggctgtaaagaaagttatttctcctaatttttcttttatttcttttgaagttaatttgtcataccctaactcagatatatctgtatctaatctttgagctaagtatctacccatagagtaagaaccacctaaaactttaaatgcgtttaaaccaaatctataagattcgtctttaacatatattccgcttacgcctagtgattttgctaagttatctaatttaactaaaggagttttttcatattgtggaaagctctcatgaaaagctttagcctttgcaatttcttcatctcttaaaaactcaattcctttttctttttcctctgatttaggtaagttatttaatttccattttatttctctcatttattttatattcccctttcaaatttttcggtgtcattttaattttttatctttgtgtcttatagtgaagcaattactatgccaatattatttattctaaaaacaatttttttatgttggaattacatatatttataaaatttctttgaattttataaatattaaatgtgaaaaataagatttataaaagaaaaaattctcatattgggaaatttttatcaatacgagaattatcaattcgagaaatcgtttatttattttaattcttcctttattatgctcttattttttatatgtctattgttttgtcagatatattactacttttattttctataaatatatggctataaccttcttacgcataaactctataaatttatatactttatattctttattacccaaatattctttattacccaaagcctccaaaatggcttaaatcttttcatagcttcttacagaagtttacatgggcgtccctccaataagcaaaagtgcaatatgtgtaccattgtgtcctacttgcgactattgagctgtcgaaattcgcaacttcgcatttatctgatgaaatgcactatgcaaaatattcataacatccacaacagagttaaagttacctattcatattcactgtaaaaatttcttccacaggaaatgtaattttaaccaatcctattgagacaaactcaccacttatttttttgaactcacgcagtaatacatcacttgcccgaaaaaaagcctcactttcatcatctccagtaagtgctattgtgcaatggggtacccaacgattggggtggtaccattcccaaccatttgaatcaaaatcttgtagtacctcatataattctctctgaaactgatacatactgctattcattataggtgatacaaacaccgttttagtatcattaaacatgcctactgaaccaatgtaagcaggtattaccttatggttttgtgcaaacccctttagcttgtctatgcaacaagcctcatccacatcattgaaacaagccaaagtaagatgaggtcttgttttccattctaagtacttcgtactaattttttcatcagcgatttttttagataaatcaaaaagttgcttttccgtttttttatcataatatagctctatcgcatattgcataataacacctccaccataaagtaaaaatacctatctataaaaacacacaaatacctatcattttaatattatattactactgttcctcttccaattttctatatagtgtagccaaacctatacctaaatcctttgctatcttcttcttcgtctttgtatctcttccatacttattcaacaacttgtttatgtaagtcaactctaattctttaattgaaagtatcctttcctgattctctactatccctccaactatgtcatcttcaaatattatatttatatccttatttttacaaacatttccattaatattataataatttaaaatatccaatggaagcatatctttatatattattccatcatctccaaccaaattcatcatatattcaactgcattttccagttcccttatatttcccggccaattatagttaatcaacatattcattacattttcttctattttatttaactgaatacctaattctaaagaatatttagaagcaaacttcatcattattgcctcaatatcatcctttctttccctaagaggtggcaaatttataggaattacatttaatctatagtataaatcatccctaaacttaccttcatttactaatttcaataagtttttatttgtagcagcaatcactcttatatctaaatctataagtttatttgacccaattctcgcaaattttctctcttgtaaaactctaagtaactttgcttgtaaaggcattgacaaatctcctatttcatcaagaaatataacaccttcatttgcaagttcaaatttacctactttacctccactactagctccactaaatgcaccttttatatagccaaatagctcactttcaaggagattttctggaatagcagcacagtttatcgcaataaatggcttgttccatctgctaccttcagcatgtatagccctagcaattagctctttacccgtaccactttccccagttataagtacagttgaatttgactttgctaatttcttagttctctcttttacttttaacattgcctctgaatttccaattatagactctatatcactatttccccagccactattgacttttccatgtcctttatgattgatatatgtcttgtcaaatattattattttgtcgtattgatttatatatggatataccggaattattttggcatttatattataaattttgttatcaatatcaatttctagtaattcatgtccatttgaggaagattcaacagatactatatttactatattttctattatatttttatatatatctaatttttttagagctatattgtttatataagatattttgctatttatgtctagtattataacgcctttttcaacattttcaatgatttctatcatcatatccatttttctactgctattttttgacgcttcatgttcttctattttcatagaaattaaatcgcatatatgattgacaaattttaaataattatctatttttgcacttatttctacttttttagttttatctgtactaatagcaccaattactcctatagttcgattattatactttattggaactgctattattactttatttaggcatttcatgtaatgggaacattctatacaaagctgattatcacatatatccaatacgactaattcctgacctgtctgtataacattgtcgtaaataaatccttctgtaacaacgctttcatttatctttgatttatacagacctgtaccactaattcttattaatctatcatcaactatttcaatatctacatctaacacactagctactgtttcagtgtattttatcatttcttgttgaaattcttttaatttacttaacatagtttcccccattagaatttaatttaccaaattatcagtttagctatattttaacatatagtcactctttaaaatatatataaaacattacttatttatatatttacattaaaacacacaatattaatttataaaaagtttgttttatatgatgaccttaattacttaattataagatacagacaataaagtaaatcacaatacaataataaaataaaaaaagctttcctcatataacaaatatatttttgacataaaaatatacattatatgagaaaagctcaatagttaaatatttagatagatttttatatagacttttttaatataaacttttttaattgtagactttttttattagtttttaatttttattagttttgttattggttttattgttataatacttataatactgccattgcttcaatttctaaaactgcatcttttggtaattgagcaacttgtacgcatgaccttgctggtggattttctttaaaatatgtagcatatacttcattaatatcattaaaatcctttaaatcttttacgaatactgtagtcttaaatattttatccatacttgtaccagcttgttctaatattgcttttacattatctaaagaagcttttgttgcttcttttgggtcagatactaactcgccagtcttcatatctattggaagttgacctgatgtagaaactatgtttccaacttgaattgcttgagaatatggtccaattgctcctggagctttctctgtagctattactacttttgacatgacttcacctcctattattaagttatatttacaggaaaataaaatttcctaaacaccaatattaatacgaacctttagattaaatttcaaatctaaaacttcaaataatcaatacttagatgattatgtttatttgtgtcttgttaacttttattaaagcaattaacgtgccaaactttatttatatataaaattttgtgaagtcattcaaaatagttacttctgaattttttcgtaaaaaaatgctttaaaattacttttttatgatgtcaatttttttctcatatctagaaatttaccaacatgagaattcttgttttgagaatttacagattaaagttatttttcaatcttaaattatcaagttattacatatgaaagaactatagttgacaatcccactattataaataataaaacctttacccataccttatttaccctagttatcatagagcctattgaaaatataacagctaaatataataataaccaaaaaattatcaatatctaccactgttgctgaaaatccaaaaaactaccttttgatagtattacttaacaatctaattaatctcataataaatttacaacttataaataaattgttatattggccgtatctcaacaactttctcctttcctagttttaaatcttttatagaattgtaccacgtctaagtaaattttcatactattaagtcttatttctaataaatcattagctctcattctatgcccaataatgtaagattgtagtaattttattgattttaatagttttatttaatatacttatattaattattttcatgtgaaattattacttatatagggggatttttttaatatgagcaaaagtgaattaacggcagaaacaacagaagaaatgttagaagtactaagtggtaaagattatgatattgcatgtcatttacatgaacttggtaaatcattagattgtaaaattgaaccaaaaacaggtgctcgttcttacaaaatagtatattcaactaagaaaccaaaacgtagcttatttactattgaatgtaatgaaaaaaaatggagagttaaagcaaatctttttcatctaaatacatataaagatgctgtggaggaatgctctaaaactattaaagatagtataactaaaactcgtacttgtaagaaatgtaattcaaagtgtattggaggttcttcgtttgatttagatggaaagtcttatctgacttgcataggaagtggtcattattttgcaaatatggaagaaatggattggaaaaacctagaaaaattaattactaaagaaaataatattatgcaggaatctgtatagttttttaagggtaattattaaaatatatgagtaacaacagatacttaaataggcataaaaaaataaagggtataataaggatatagaataaaaataaatgatatagcacaaagaggctgtctcaaaatatagataagcctctttttattgttgaaatgataagaatatattcgattttatacaattttatacaaacatactaagccaacttacccatttcatatgcctgtttcattgccttacttcccttaatatcacctacattccaagcacctacaccatatactatacctttttctttagaaccatttagacatgatgtaaatcctctaaatccttctattgttctttccatatcagccacattttcatctgctgctgcaacgataaaatagaaatctttatcacaaatttcagtatatctagagcaagttctatcaatcatagttttcatttgcgcattcatagtataaaaataaacgggagtcgctaaaacaatcacatctgccccaatcattttttcaagaatttctcccatgtcatctgtctgtgaacaacttgcttctttttcataacaagcaccacatccagtacaatagttaatatctttatcttttaaaaatatcttctccacttgatttttagattctaataccccttgtataaactggtcacacaataagtcagaatttccaccttttctaggactagctgatactattaatacatttttactcataagatactgcctccattttcttatttctactgctctttaatactttttctttctcaataataccttcttcatatctatcaatcttaaaatttaatcgttccaaagttttttgcatttcttctattctttttgctagttggtttctctgctctattaaaagttcttttctagctttgatagtactgctcccttgttgaaacatagctacatactcaattaatgtctcaatagaaagacctgcacctctcatacactttatgaaattaacccactcacaatcttcttctgtaaaagacctaattccacttttatttctatttacaggtggtattaaaccaattcgttcataatatcgtaaagtatccgctgaaagctcgtattttttactaacttctgaaatcgtcatacatatcttctcctcttgatattgtatagattgaattatttctcaaaggtttctgctacattctttaaagcatctataattttaatgtgttgaggacagctttcttcacattgtttacattcaatacaatctgaggcctttccataagttttagtataattattatagtaaaccatctgtgttgaaaatccagtattaagagcttgtttttctgcattgtacagcgcaaaatagtttggaatagcgatattttttggacagccttctacacaatactgacaggcagtacaaggaactaaaattgattcgttgataatctctactgcttcatctataatattatattcctcttgtacgaatggtttgaaattttgcatatatcctgtattgtctaataattgttccatatttgacatcccacttaagaccatcataacattatctttacttgctgcaaaacgtattgcccaagatgaaattgacatatctggattgtagtcattcaataatttctctgctttttctggtatctttgcaagtgtacctccttttactggctccataacaattacaggcttattatgcttctctgccacctcgtagcattttctagattgtatgctttcattatcccaatctaaataattaatctgtaattgcacgaagtctacttctggatgctcactcaagactttatccaatagttctgcactatcatgaaaagaaaaaccaatattctttatttttccttcttttttcttttcttcaataaacttaaagctatcaaattttttagctacttcataatgtgacacgcctatattgtgtaaaagatagtagtcaaaatagtctacaccacatttttctaattgctcattaaaaatggtttcttgctcttcttttttctttaaagccattaatggaagttttgtagctatagtaaaactctctcttttgtgtctttttactagagattctctaagtgctatctcactttttcccatgtgatacacataggctgtatcaaaatatgtaaatcccctttctaaaaaagtgtctaccattttatttaaatgttccatatcaatagttgtaacatcattttcatcttttattggtaaacgcattaatccaaatcctaatttttttgcctccattgttttacttccccctttaaaacttgtttgttttttctctctactttaactattcttacaagtatataattcttgtataattatactttactacttggagttaacttcaagtcaatagatttttttatttttaagacaaatattataaaaatacagttctttaatattaatccattgcatgtttctttcaccctccaattctcaaacttcacaaactccaacatgcaaagaaatatatactttaagaaattcagtccattaatattactacaaatactttttagatatgtttaaaaagaaatttcacctaaaatatttataaaagatttagaaataggtcttgtgtctattttaaaatatataaaacagtggtaaagacttatttataagataaaaaatgaatagtgtataccctttttaaaaagttttttcctttttatatttgtgatacaatgttaaatataaaaaggaaaattttgtattaaagaaatcttatttgttgattttgtaacttcaaactcagtatcaatttgattttaagattatattttattaagtatgctaaataacaaatttttaaagattgtgaggtaaaaatatgaataataaaaatttagctatattaatatcaggtatgatgtttttttctagttcttcagcaatttttgcagacaatactacaaagcaagaaagattaataggtaaaacaagatatgaaacagcagtagaagtaagtaaattgggatgggttcaatcaaaaacagccattatagttaatggtaattctattcaaagtgcgctttgtgcaaatccatttgctaagctaaagaatgcacctatacttttagtaaacaacaacagtattgaaaattcaactaaggctgagcttaaaaggcttggtgtagataatgtgtacattgtagatagtggaaatagcatttcttctaaagtagaaaatgaaataaaatcacttaacataaaaataaataaaatagtaggaaacaatatatataaaatgtctacaaatgtacttaaagaaatagataagataaaaaaggtagaaaatgttgcagttgtaaatggactaaagggattatctgatgcagttagtatagcttctccagcagcaatacataatatgcctataatattagtatcagatgaaaacagcaatgatagtagtataaatttcttaaacaataggtctataaaaaaatcttacatagttggaggaaataagattttatcagacaatacagtaaagaaatatccaaacagagaaagaatcagtggttcagatagaaacaatactaatgcaaaaattattgataaattttataaagataaaaaaataaataatgtatttgtagctaaagatggtattaaccaagaaaatgcattagtagattcattatcaataggagtattagctgctaaagaaaattctcctataatgatatctaatggtagccttgtaaatagtcaaaaggaatttattaaaaataaagatatagatgaaataacacaagtaggaggaggatataatcaaaaagcatttgaagatattttaaaactaaaaaatgtgaacataagaaataaaactaaaaaaatatctttaatacaggctaaagaaatattaaaacaagctcttccaggaagcgatattttagtttgttattatgatgaagatgataatgaatatgactgcaaagttataaaggataatatcctatatgagatagaaattgatgcctactctggtaaaataatagaaattgaaaaagatgatgacttaaatgataataatttaggtacacaaaatatatcattggataaagctaagtctatagcattagatgctgttcctaatggtaatttaatctattgtaaatatgatgctgaagataacgaatatgaggctaaagtaataaaaaataagaaaacatatgaattagagataagtgcatttgatggaagaattgtagatattgacatggacaatgattctgatgatgactttgatgataatgataagaataactctaatactaatgacaacagttctattattagtgctgaaaaagctaaatcaataatgctagataaagtgcctggtgggaaaatagtaaaatttaagtatgatgaagatgacaaagaatatgaaggtgaaataataaaaggaaaaattgaatatgagataacaattaatgcaattactggtaaaatattagaatttgaaatagatgattaataaaaaatatatattctattaattattacaagcaataaagccataaatattgaatttttcaatatttatggctttattttattttttttaatttaaatctacattatgccattatatatctatgcactcttttaaattaaaatcttgtccatcatcccaaacctaataaagttagattttaaacaatatattgtgatataagtaatttgtgtagaattattgcgtgatttactcatgaagaaacaataaggttaatatataatttgactatattaagacgaaaggagacatatacaatgaatacaatattaaaagtaaataacataactaaaacttataataaagggcaacagccgagtttagataaggtatcctttaatgtatcagaaggtgaatttataggtataatgggagcttctggctctgggaaaacaactctgcttaatgtattatctacaattgataaaccaacaagtggagatattttcataaataatataaatttgaaatcgcttaatgacacttgtgctgctgattttcgtaaggataatttaggctttatctttcaagagtattttttactagatagtcttacaattttcgagaatatttcagtacctcttacacttcagaaactcaatccagataaaatagaaaacatggtaaagagtctagctgaacgatttgacatagcttctcaattaaataaatacccaaatgaattatctggtgggcaaaggcagagagcttcagcagttagagcaatagtaaaacatcctagtattctctttgcagatgaaccaacaggagctttggattctaattcagctactgaactactccactcactacaggaagcaaatgaggagttgaaaacaacaattttaatggtaacacatgatgcctatgcagcaagttttgcaaatagaattttgatttttaaagatggtcatatcattaaagaattaaataaacaaccgaataatagacatacattttatgagttgattattcaagaaattgcaaaattggatactaaaagataggaggataatttaatgaacattttttatatggcaataaagaatcttaaaaaaaacttttcattctattctctatatctactttcagtctcttttgttattactgtatttttcgcatttacttcattctctgttaataagataatgctagaaaaaatttcaactgatggtagagttgaatctatgtgtaatgttatttcgatatttttgatggcatttgtcatcttctatatggcatactcaaatcgattcttcttgagacgtcgtacaaaagaattaggcatatatgctttacttggctatcgtaagtttacaatattatcgctacttacctttgaaaatgtattaatttgtagtggagcttttattactggattggtattaggagcattgtcacataagggtattgtctttggaattacagcactacttaatttatcaattgataattcacagataccattttttaatataaatgcaataaacaaaacaattatctttatagcattagttgttttagtcttagctatatcaaatggtaaatttctttataagacttcacttgtaaaattgataagacatgaaaaaagtgcagaaaaaaaattaaagttcagaaaaattccagcctttatgggatttattatgattttaagtgggtattgtttatcactagatattcttcgtggagctaaatcagtatgggtaagtattggattttatcaaatgggcttgataactatgattatcattgtaattggtacagttctctttatcaattcctttcttccatatattatgcaaaagagtaaaaaaaataaacgtactttctacacagatatgaagataatagctattccaaactttatctatcgtatacgttcaaactctaaaactctaattatgcttacattactctctgctactactttgacagtttcaagtgttatggcactgtccttatactaccctattgcatctgtttcgcgtattgcaccttcagagatagaatttagagtagaaaaaaataaacaaatagaagatgtaaaacaaattgtcagtcaatatacgtctaatacagatgatattatttttacacagacaaatatttataaggtaaaatcttcatcaaaagaccttccatttgaatatgaaattggtacatctaagaataatttatctaatagtagttcttctaaagaagttatttcaagagaatcaggatttgaatgtatatctttttctgattattatactttattaaaggcacaaaatcgaacaaagctactaaaacaacttacccctttaagggataatgaatgtattttaatgaaatatcaaccaaataatgatggatatagtgaaaatggaacgatttatccattacttattaatggtaaagaaacacctgtagctgtaagggaaacatcattaaacaatgctatttcttttgccaatagcgttggaacacttatcgttaatgatagtatatatgagcaaatagcacaaaataaattaccaatgacaagcattttaagtattaatggtaaatcaattaaaaataatgaaaatttatatagtaatatttcagattatttagatggaagcccttatttacaaggatattctcacaggataaatgatttattatcaattaatagttctacatttctgttaatcggatttcttgtggtattattctttattgctgttggaagtattttatactttaacaatatatcagcaatttcagattcaacatctgattataagattttacagaaaatgggttatgataatatacaaattaaaaaaattattaaaaaacaagtattgccattttttaatattccgtttttacttggtatattggactgtatatttgctaccttggtttataagactgctttgatgcagaatttacttggaaattcattttcacaatacatacctgtgattattgcaattttcttaacttctgtagtgtatttgatatattatatacttactattaaatcctgttgtaaaattgtattaaaaaattaatatttaccaaatcgtcaagcttagaggtgtgacgatttggtatacttcatttataagtatttgatataatttaaaattatagattcttaggtttgatttagtcataaaattaatataattaactcataaggaggtgtataagattgacaaattttaatttaaaaatactatttttaggaaactacattctatcacttctcttcatgggaatatctacaagcactgaaacttatatgaatatccaaagcattattcccttaataatttcaacattattactcatagacatcacatatataacctcttgtaatgtccgagaaaataacattatttcattattttgtggattactagcactagacagttggtatttactcttatcatttgtaaccacaccaataggcactattatttttaaaatattaagcacagttatagtgtatgtctctattaaatttatatttttatttttgtttcaaggtagtggatacaatttccgtaagataacagatattttattgcttatcacctgcattggtgcaattgtaggagcatttatttctaacagaacgtatgcttgtatgtacggaatacagtttgttgttagtataataagctttttatatattattttttatcatttgaaaagggttgtttttgtcataaaaagcgaaaaaaagcctatatcgatttcagtatttataacaattataggattccttacttattatttttttacactaagaatatcaaatcatattggtaattttggaatctatctaactgtattggtattttttatgagtattcatggtattgcacttaaagaaaatgatagttttcctatttcaacagtttttaacataaaacaaagggctatatttctttttataagtattttagtaattagcttggtcgtactatttgccaatgggaatttttctataatattaatagctataaatgttttatttatgcttattttcctctgtaacattattttggagtttaaccttagagatgaaaaaaataaagtagttaaaaatagcaagtatacttttgcattagaaaaattacaacaagaagaacaactaaaaacagagttttctaattttttacatgatgacatattacagaacctgctttcaataaaaaacatgatgagtaagtcatatcgcccagaagttcaagatattatatatgaaacacttaacaatctaaatacatgtataagaaatcaaatgcaagactatcatcctgttattttaaaaaatttaacagtaaaagaaaattatcagaatttaattgaaagtgtttcttcatcctttccacaaaaaaacatttgtgtttcatttaagtgttctgatactttattcttagttgaaccatatgatatattgatatatcgactgattaaagaattattgacaaacgtgtataaacattcaaatggtagccatgcatggatagctttagcactagaaaaaaatataataaaattaaatattaatgataatggtgtgaaaaatacatcttttaaaacacctttagatataactaaaattacttttgatataataaaacacaaagggattatatcaattaaagaacaagtagaaaatctaggaggaacgataagtatttctgataatatacctcatggagtttgtgtacagattacaatccctatgaaaggagatggttcttataaatattttgttagttgatgaccatatgctttttgctaaaagcttgtcaattgcactagaagaatacgaagaaatcgaacagttttattccacacaggacatccataatctttcagaaatgattcaagataaaaaaatagacattgtcttaatggatataaaccttagaggcttaagtgaatgtgatggcttaaaagtagcttataatttattagagactaattcaactattaaaataataatcttgactggatacgacctcccagtttataaacatgaggctaaaaaaataggtatctatggattcctaaataagaatattagccctgatagtttaattgattcattattaaaagtctatcaaggggtaacctgttttccatctgaaaatactgaagtaattattgaagatttaactaatatggagaaaagaattttacagcttatctgtagtggtaaaaaaagaaaaataattgctgatgaattgtatataagtgaaagaacattatcaaatcatttacaacacatatatgacaagctagatgtttcatcatcagttgaggctattacaaaagccattaaaatgggttatatttctccagtatattaaaaaagtgagtgtctcaaaatgaactttctagctcataaggcactctcctttgtattaaatcaaatatattttcatcatttaaacaattaagaagaggcttctctctattttgagacaactccattttaatacactatttatatttatatataaacatattttaaacaactaaaaagcaactaatatctcaatacatatcttcataacacatatcaccataattacaagcagataaagaactctcctcatttaaatacgactcaaattcatacccaaacagaattgttggttctatatatatttccatatctgtatatctccatcttcttacctttgcctctataaccttgtaaaaatcttctaaactatacccttcttttaatcttttatctataagtgccttagttatactcaaatcagctttaaaattttttcctgattcactatttaattttcttataataatttcatgtatgctttctggatttttataagtagaatcttcagtcaaatcttcatccaaattttcaaaggtatttttatttaaattctttttatttaaattattttttaataattcttttttctttgtctcattttctgtttcatacccagtatgaattatcaaatcataatctttgtctatactctcttgatttatacggctgtatgtgttggtattactgttcttgaacaactcatctctatgtttatatttcattgttttttggttattgttaatagttgcatcaatgtatttctctatatttttgaaaatatcactattctttgttacaatttctgcattactattttcagaacaaacataactatatacagaacaacaatttccctttactcccctacttattaatctcaatatacctaaatctataaattcatttacaagtctacttattgtagatatagatacatcaaggtcagatgcagctttccttactgtcatcataaattgtcctcttggcagagttccttttaatctttgtatattttcttttctcattacatagtgattaaaccttattctatttacatctcttttttcattaaaatataatactgctgaatttaattgataaaaactattactcatattcccactcctccaatttaaatagataatttgttgtaaagtttttagatttttaaataacttattaaatgattatttttattaaaaagtattctttgatattttcattttaaagttttaagtataataagttaatagtgtagatttaacttttttatttaaacaataaacttaatattatttttaatataataattttattaaatttagtatgtaattttttaatcttattttattccctctatactcttatgctaaataataactttgataatatttccctaacttatgtttcaactggtttatattgcaatttatttaattacagcttatttgcataataattcgtccatatcataagttgtgtatttatataaatacacaattaaaaataaatcactatggtatactaattattacgaagactatacttatatgcaaaaataaatataaggcatcttatatcttttattaattataaatatcttttatcaattataaaaaattaaacgctatcttatttatcataaattgcaaaaacataaaattttattactatattgctataaattaattaatacacattttacacaataaggagggctatatatgacaaatgctaaaagtaaaaaagaatatctaaatcgtatttgcaaagtgcaagactatatagaagaacatttacatgaacctctttctcttgatgaactttctaatatagcaggtttttcaaaatttcattttcatagaatcttcaaagcaatagaaaaagaaactttggcacaatatgtaaataggctaaaactagaaaatgcaactgcttttcttattcatcgaactgacatgactgttactgatattgcacactacttcggctttactgattcagcagttttctcgagagcatttaaaaattactataaaataagccctataaaatatagaaacaattatagcaagaattgcaaagaaccatataaaatttctcagtacaatagaagcatatcaaaacctaaatgtaagaatactagagaggttaaaggtgaaattgaaattctagaacttgataatatgaatactatttacactagatatactggttcatatggtaatctaaccagtactttcccaaaacttttagaacggttattcacatatgcaagtgagcagaatctacttggacttgaaaacacacaaatattagccatttatcatgataatccacaatttacacaggagcatcaattaaggactagtatttgcatgaccattccagataacattgttgtcaaagagaatgacaatcttggcaatatgataatcccttctggaaaatatcttgtgggacattttgatatttcaaaatctgaatatagtgatgcgtgggattttatgtataatgaatggctatcaaatggtaattataagctacgtgcctccttcccttttgaagtatatcttaacaacccacacaatcaccctcaaaatagacactttgtcgatatatatttacctatagaacctttttaataacctcacctaatctattcttgtattaaggattaatatatccctattttacggtttgataaaattgataaaatgaggtgaaccaatgaaagaaataaaaattaatggagcaaagatacacaatcttaaaaatatagatgtttctatccccaaagataagcttgttgttgcaacaggtgtcagtggctcaggtaagtctagccttatgtttgacattgtatttgaggaaggtcgtaaacaatatctgcaatctttaggtatacttgcaggtattgatagtgaggataagtttgataatattcaaggtttagctcccactatagctgttcaacaaaatattattcgccagagcaatcctcgttcaacagtaggcacaagaaccaatattctcaacatgcttgcactattgtattcagtagaaggtcaaataatgtgtactatgtgtgatactcctgtaagcgataatctaatttgcaataattgtgggtatgaggaagaacgattaagaccaagttatttctcatacaactcttcagatggaatgtgtatgaagtgctctggacatggtgcatattttgagattaatattgaaaaattagtccttgataagcatgataccctaaaacaagtcttagatagagcaaagattacaccaggatatttgagagtattttctaaaaaattcaacgattatttagacatacaattcttacaactacctgaagaaataagaaatgaagtactctatggtcattatgaaaatggtaaaaaaagttcctctttatcaaaggtatttcacaatcgttacaaaaggggtgaggatttaaatggagtttatactatgactgcctgttcagattgcaatggttttaaaattggtgaagaagcacgtagagtacttttaaacggaaaacatattggagaacttggaaaaatgacgattttagaaattgatgatttccttaaaatcttaataaaccaaggtaatttaaacacatttggtacaaatcttgtaaatgatattttatccaaaactcgacatttaatagaatcacgattaggtcatctatccttataccgagaaatgtcaactttgagtggtggggaaatgcaaagactatttttaaattcacatctcgattcagagatggactcattaatttatgtgcttgatgaaccaacagctggattgcatgaatcagaaaaaatagacatcttaaaatcaataaagaaacttaaagatttaggcaatacggtcatagtagttgagcacgataaaaacacaattgaaatggcagaacatattattgatattggtccaaaagctggtgttgaaggtggtcaattagtatatcaaggagatttagaaggtctacttcaatccgacaaatcacttactgggcagtatctatctggaaaatatccaatgcctaatagaacaagcaataaaaatattacacatactgataaaataccttgtataactattcaaaatgcaaatacaaataatcttaaaaatgtaactgtatcattacctttgggtgctatggttggaatatctggaaaatcaggtagtggcaagagttcacttatatcagacaccctacttcctcttcttagaagccaatttaataaccatactatcaataatcaaataaattcttcagatagcgaaataggtgatgaagacgattatgcagttattgaaactattgcagatagactgattggtactaaacatatttctggatattcagagatatctcaatctcctattggcaaaaatatgaactcaactcctgcttcttatattggtatatgggataagatacgtacactatttgcaggtcagccagaatcgttagaacgaggatttacagctggtcatttctcatttaactccaaaggtgcttgtcctaaatgtagtggtagtggatatgaaaaggtctggttaggaaataatctaagtatagaccatatatgcagtgaatgtcagggaaaaagatttaatgatgaatctttatctattaaatataaaaataaaaatatacatgatattttaaatatgagtgtttctgaatctgtacatttcttcaaggatattccaaatattgtttcacacttaaatgtattagaacaaataggtatggggtatataaaattaggccaacctacaccgactttaagtggtggtgaatcccaaagaatcaaacttgcaaaagaaattggtaaaaaacgaaatggtaatatcctttatgtattggatgagccaactactggtctaagtctatatgatacttctaagttgattcaattattagatgaattggtggaaaatggaaattctgtaattgttgttgaacatgatatagatgtattaaatgtttgtgactggattgttgagcttggtccagaaggtggtgacaaaggaggttatataattgcagaaggttctccaaaaactctaaaagaaaatccaaaatctataacagggaggtatctttaatgaataaaaacaattgcttagatttaatatttgaaaaagtagacccttcaagtgttggcatgagttcagaaaagctctcacaactggaacctttaataatctcacaatatagtaatataaatggaataattattgcaagaaaaggaaaagttgtctttgaaaagtactataatggatataatgctgatgatacttttcatgttgcatcagttacaaaaagtattatatcagccttaataggtattgcaatagataaaggatatataaaagatgttgaccaaaaggttgttgattttttccctgaatatacttgtagtccttctgaaatatgtaaaaaagcagtaactatacgtcacctacttacaatgactgcaccatacccttttaaaaatatgactgagtctttagaaagactttgcaaacaaaaagattggataaaatataccttgaatcaacttggtcaaaaaggcgaaattggtactttcaaatattcttcagctggaacgcacctactttcagctattataacaaaaactactggaaaatctgctcgtgaatttgctaatgagtacttatttaaacctattggtatgaaagttataccagattatgatatgaaagattttggttttgaagatttctttggaaaaaatcttaagggttgggcaaaagatagacagggttattctataggtggctggggacttacattgagtgctagagatatgttgcgatttggttttctgtatttaaatgatggtatttggaataataaacgtattatatctaaatcgtggattgaagaatcggttaaaatgaatagtaatgaatacggttatctgtggtggatatgtaaaaaagatggtgttttgtggtattcagcaatgggaactggaggaaatgctatttgttgtattccacaatatgacttagtaatagccataccatctaaaatagtgtttaaacctcgtgatagatgggagtttattgaaaaatatatacttacttctataatagattaatcactcttagataaactaattactcttagataaccaaaccctccactataacaccagacttttgtttggtgttattatgactaatactatatatctaaaaggagttgaatactaatggacacttacacgacatcagaggtagcagatttaattggtgtacatcctaatacagtacgtttatatgaagaactaaacttaatacctaaacctaagcgtaataccaatggttatcgtatctttaatgattttcatatagaacaatttagatttgctcgtacagccttgaaaattgaagtggtacaaaggggattaagaaaagatgcccttgagattgtaagaacatcagcgaatagggactttgataaggctattagtcttgtaaatcaatacttgcaacaattagaaatagaaaaatctaatgccgaggaagcacttactattgttgcacagattttaaatggaaatactccagaaacaaataaactctttttaactagaaaagaaactgcagaacacttaaatgttacaatagatactttaagaaattgggaaatgaatggtttgttaaaagtaaaaagaaaacaaaatggttatcgtgtatatactgatgaagatataaaacgacttaaaattataagcgcacttcgttgtgcaaactattctctttcagctattttacgaatgttaaatgctttatcttctaatcctaatactaatattaaaactgtccttgacactccaaaagatgatgacgaaattatctcagtgtgtgacaaactgataacttcattgaaagaagctgaacataatgcaaaaaccatgaaatctcatcttcaaattatgaaaaaacaattttcctagccctccactctaactccagactttgatttgtgtgttatccttaagagcaagaaaaattcaacacacaaatcaaaggaggaataggatggaaaacaaaaatactaattctacatggaagaaaaaagtcattctttttttagcaagtcaatatatttccttatttggctcatcacttgtacaaatggcaatgatatggtatgtcacacttcagacatcatcaggtgtatgggtaacagttttaactgtatgctcctttatacctcaaatgataatttctttttttgctggtgtatgggcagactactacaatcgaaaggtactcataattgtatcagattcaacaattgctatatctacattagttctaattctatttatgatgtcatcaaatggcacaacaagtgaattaatagccatatcagtaatatctgttatacgttcactaggaagtggtgtacaaacacctgctgtaaacgcaatgattcctcaacttgtaccagaagaacatttaatgcgttttaatggtataaatagtagtctacagtctatagtacaatttatagtgcctattgtagctgctgcaatacttggatttggtaataaaataaatcaagttcttttaattgatgtatttactgcaattattgctattgtattattgatattcatcaaaattcctaaacataatataccaaaacaaactgaaaaagtctcattttttgcagatatggtatcagggataaagtactgtttttcagataagttcattagaaaagtgcttttcacttatggagcattcatgcttctttgtgttccatcaggatttcttataggacttcttattgaacgaacatttggcaagggttatatatacctgtctattattgaaatgattggatttttagttatggttttaggtggattgattataggagtttttggtggttttaaaaatagaaataagaccttttttctagcaatattatcctatgctattttttcaattattctaggtcttgtaacacaagcttggcaattttttatatttatgttttttacgaatttttcaattccaattattcaagcatcagctatgactatgttgcaagagcatgtagcaccacaaatgctaggtcgagttcttagcttacctattattatatatactggttttattcctcttggtatgatgattttcggaccaatggcagatgtaatttctattaataatttaataatcgtagcagggattatacttttattttttgctttggctatcccctattcaaaacaattttacaagcaaggaatatctaagtcaaatgaatccgagtaatatatttaaatagtttaactcgatttatctggttaaaaatgagggggcttaaaatggactttttaatttatgaagaaaattttttatatgaaatcaaatatattttatcatttcaacattgaaaaataggtttatctttattttgagtccctctctttatagcaaataatattttgatactatctttattaactttatataataatacctcatataataatacctccatttatatcataaattaaatttatagtacaaatggaggaaaataaagtatttatatagtttaagtacctattaagttttccactaagtagctctaattgtactgaatttcttactaaattatattgaataattataaaataaaactaactattacactacataaattaaagtatacaaattgcactacataaattacactatacaaagtatattaaatcacctattaaattgtcccaattataattatactgagttatctactaaaagataactttctttttttatctaaaataatatatatcataaaccatactacacaatgtacaaccaaaattacaatatcttttataataataacattaccattaataatctccataataccattaaatgtagcaactgatggcattatatagcataaattccctataccgctggtattaacccctagaagatatattaacaaaggagcacctataaataaaatcattactattttaatataaacaattcctaccataagaccttctgacaactttccaataaataaacctataagtgatgaaataaatgctgaaaatacaacgagtaacaacatcattatcatatctaatattgaaatatccaaacatataaatacagttatcattgaagataaacacccacataaaagacccaaaaatactttttgtataatatactgacttctactctgtggcaaaacttcatttataaatgatattccatcttctttttcagatataatattcattgcattaaaggtacatcccataaacatagcagtaattaaaatcatagcaataaaaacattctgaaactcttttaaaatactatctttaggcaatattgtaacctcaacatcttttaaatcaccctttagtctaaacatctctggcaatgtctttccaacattttttatagcattaatctcatttccataaagcatagtttttattcctttaccatctctaacaactccaattgtgtccgttttaatatccttaatttcacgtattaaatgcatttttgtgtcatatacacttaccataccatacttcttcaaccactgctctgtttgtacaggaagtgtatccttcactataccaaaacgtatctctcctaatgaagatatatcaattgttcccataaaatttattaaaatcgccataacaactggtaaaaagaaggaaattatacacattttatctttttttatactctttaactggtaacgtaatcctatcaagattatccctccctaaccaactctttattaaaaatatattttacaagtaaaaatagaactattattgtcaaagaacacactacaaaataaactaattcttttgaaaaattcatgaaaaacgcatttttaagctgactataaacatgatagaagggatgatatttaatccaatctatttcaaaagatgtatttgcagatagaaatataggtgtagttatgaatacagcaaccacaagatatataagagaaaattgcttaaaatctctcaataacattgagcatcctattccaatcaaagacataataattgataaaatactagcttgaactaatacttgtggaagtatttttactccttcaaaaaatccaatattaaatactactaaaagaactgtaaaacataggtcacatatcaaaaaagcaaatatctttgataatataaaaagacttctttttacaggtaaaataccagtaatacgcattactcccatctgcttttctttaaataataaagaggcaatccctaaaaatccaatagctacaatttcaaagaataaaatctcacaagtcatgtcttttctttgttttatctcagatgtatccttatcattaatttgaattattgcattgttgtctgatattttgctattatggtctttttctgatgataataatgacaatgcatagtcagctctataattgtcaactcctttaatactttcatgtaaaattactttcggcttactggaactcatatcaatacaaactgcacttgtatcttcatcaagttttgcttttaattcacctatagaagaaacttgattaattaatggagatgcactcatgcttatattctctggattatatagatatacattattgtgataactatcttcatccataaactttacataaccaaaattaatataacacgaataaagtatgagagagccaagtgtcagcacaaaaaatttaccataaatcatcatccaaaaatctttttttactaaggtaaaaaatttagaatacattacactaacatccttcctgtgtatttaataaaaacttcttctagtgtaggttcttttgaatgtacacttaagatttcatcatatttaaaagttattccagattctaactcttgtatatctacaatttcaatatctcgatttccattatatacaaattccacttcaactttattattgctatttttcatttttaaatttttgggtttatctattaccataatcttgccatctgcaataaaagccacattgttacacattaaatctgcatctagcatattatgagtagtcaaaaagatagttgttcctttttttcgttcttcttcaataatcttacgaaatagtacagctccagatgggtcaagtccactagtaggctcatctaaaaataacaactttggattacttaccaatgctcttgccatgctaatacgttgcttcataccttttgagtaggatgatacaggcttatttataaactctttcttaaactctaacaaatctaagagttcatatatgtctctcctttgatttttaggataaaaagacgaaaaatattctaaattatcaattgcacttaaattggtatataaataaggaaattcaaataaaacaccaatcttttgatatagagactctgtatatgctttaacttccttcccaaaaagggatacgtgcccattgtaaccttttaaaacgccatttaagattttctgtgttgtggattttcctgaaccattaggtccaaggaatccaaagatttctccttcttttacttcaaaattaagtccatgcaatatctgtttatcttttccataagaaaattttaactctcctacttttatcatctatcataacctcctttatcatttttttgtcgtctatcccaccattttataaatttaattttaagcggaatagaaagcaatattatcaatataatagtcaaccatgtataccatttcataagtactcccccttgtaaccttatttaattacgcttctattttttaatttatttaacctattttatttctatttggtgaaatcagagtgtctctcttgtgaaatcgaagtgaaataataaaaagcttaataaaaaatcttgttttcatcaggaaaacaagacttttcattaaactttttattagactttttcattaagttttttattttattctctttaaatacttacgtatacaaagaaaaatattttacatcagatacttataatttataaattaatactaaattattcatcaattggaatcataaaataaaactctactcctctatcacgattattcactccatattctaacccttgcattgtaagtatttgtgaaacaattgcaagccctagacctgaacctcctttacgctgagattgaacactacgataaaacttagaccaaatctttgaaatctcatcttgctctataatcctaccatcattataaatttcaaataaaagcaagccattttcacatgtaatcgataaatctaaattaccattatatacaacatgcttctttgcattaataattagattctctactacttgttccattctcattttatctgccactacaaaaacttcatactctggcaaatcatatgtaaaataaaaattggcatctggtatatcaattaaaagacgacctgccacagtttcaacaaactctataaaatcaaaacgctctgggttaagtttagaaactcctgcttccaatgcagataagtctaataatgatacaatcatattgttcattctatcagtttcttctattataacattcatataatttttctttttttcttcatcaacttcatccataagcccctctgtatacgcacgtataatgccaagtggagtcttcatttcatgtgaaattgcatctaccaactcctttctttgttccaatagcattctttccttatttacatccttttcaagttgaatatttgcactttctaggtctgataatgcctgttgtagatttgtagacattgtattcaggctcctagaaagttctccaaattcatcattagtatttacagtacatggattagaaaaatcaagttgggacatactttttgcagatttatttatagatgtgattggttctgaaataaattttcccaataaaaaatcaatactcataataaatataaccagtattataaaccaaatccaaaattcaaatttagagtttatcgaaaattcttcaacaaccagataaaataatataattaacgctcctgataatttagaaagtaaaaacactttttttctaactgaatatagtccaaaattttgtttaatccaatttgaaatatctacatttttcagtttttctataatctttcttaaactattcattccttaacctcaaacttatatcctgaacgaattaatgtaactatatggtgtccttcactaccaagctttttgcgtaaggtttttatatgtgtatctacagttcgtgtgtttccttcaaaatcatatccccatatacaatttaaaagcttctctctggaaaaaacttgattagggttttccataaataaacgcaataattcaaattctttatatgttaaatcaatcaatttatcttctacatacacttgccttgatgctaccataataaaaatctttcctaaactcaatgaatttttgggaatatcagtagtgtatctacgtaacaaggcattaacttttgctaaaagtacttttgggctaaatggttttgttatataatcatctgcgccatattcataaccctttaatttgtcctcctcttcacctttagctgtcaatatgataataggtatattagtcatttcacgtgaaactctacacactgaaaatccatctaaatacggcatcataatatccaatatcattaaatctatattgttgctctttaatattgtaagtgcctcgactccatcattagcagttatacaagtatatcctcccttttgcatatattctacaataatactttgcatccttttttcatcttctacaactagtattttagccatttctatttatcacctcttttttgtaggctttattttagtttatattaatttatttatttttcaactatttttttatagtatttttatagtattttttatagcattttgatagtattttttagactattcttaatggaattgatatcatagataaaaatagcctactaactttttctatgttagcaggctaaaatatttctaataataattatattattttgtcactattctattttttcgattaaaatacattctaaaacaaatatcttcaattaatgaataaattgcacttgttataaagtacagacctatggctactggagttctaacagttagtataagacttgttatggtagtcaccacagccatttgtttgttaaactttacttgagaatttatttttaaatatggtatataattcactaaatttgaagctaacataattaatgtatatatacaaggtaatataaacaaattatcaaatgtacctaaattagcaatccatggaattataattgttgtaaattcctttgtcatatctaaacatacatgatataaagcatatactactggcatttgaaccaaaactataagacatcccagcatactcttcatactttctacagaacttacttgtatttgcttttccaattctttagtatcattcttatacttttcttttatatgttccattttttcagctaattcttgctgtttttttacagaaaatctttgttttaatgatagtggcataagtactaatttaactattaaagttataagtacaatagaaattccaaaatcacctgtaaaattaaataatatacttaataatccttgcaatatacttgaaatgaaatccattttattctctcctttttatttttaaactttagaatttataatagattcatttcaaattaaaacaaactacaatacctccaaatatcatatttctgaaaaactatatactgtttaggcaaccgttcttcagaatatgtaattctatttacaaatatgtctcttattaaaacatacttaattttatgatttaagaggtctttacaaaaataaaatatacttccaatgatagataccaataatgtcatataaattagtacatataacatactatccatatctaatctcatcacatcacctcttcatcacttatatttatctttagacaatttcaaatcctaaataattccaacatttatatttagttttaaatataaataattatagtatagaaaactcctaatgtaaatatatagattattatatttatcatttttattcgtcatatttacatttataaagtatataatcttatcactcttaatttttaataaaaatcacctaaagtattcttttttatctctgaacaaaacaatattgggtttttatagcttatttttaaattataatccttaatttaatataagggctcaatataataaatcttaatatatataaatcctaatatatatctctcttaatataatattaaatacaacctttcatacaattttaaatataatgtctaatataatcccttagtataatcacatactttttgatacaatccttaatataatcgttaataattgtatactaaaatcaatgactttttttctgattaatgctaaaataattaaaaatagaaaataaatagatttttccaaaaaataaacggaggttacttaaaatgataagtgattctatatcaaaaagacgaagtatcagaaaatataaaaatcaaagcatttcacatgaaactatagagaaaataattgaagctggaataaatgcaccttcatctaaaaacaggcaaccatggcgttttgttgtcatcactgaaaaggaaaaagaatctatgcttaaagccatgagcaaaggtattcaaaatgaaattaatgataatgggcttcttccaggaagtcgtcaacatatcgctggtgcaaattacacagttgaaatcatgaaacaagctccagtaacaatttttattttaaatatattaggtaaatcacctttagaaaagctatcccctgaagaacgattctatgaaatggcaaacatgcaatcaattggagctgcaattcagaatatgtcgcttacagctgtggaattaggtctaggtagtctttggatttgtgatgtatactttgcatatcgtgaattatgtgaatggttaaatacagatagtcaattagtggcagcaatatctttaggttatcctgacgaagaaccatcaagaagacctagattacaattaagtgatgtgactgaatggagataaatagttatagtaagcaaatagtgcaaacagaatttatattaggtgaggtattttgatgaaaaaaattattaaatcttttacattttgttttttttaattgcattatttgagatttatatccaccaaattggtcaagactcaaaaagtattattctaataggattaaatcctattttgtctattatttctaccattgatagtttttttgtttttatggattcaggcatgcaaatcccatgtagaacaattacagggtcaatttcgatttattggtacatagcatctatactttcttttcttatttatggtataattttagatttaattagaatagttatttccaaaattggaaataaaacaaaataatcatcataaatagtgcattttcttgagctattaaacttcaccggatatagagacataacatatacttagcttcagaaaatgcacctttaaatcttcatatgaacattattttacttacattaatttaatgttacttaaaaattaatgtattgtatttctttaaattaattttctatatttcttaaattagtttattatacttctttagattaattttctatacttcctaaattagtttattatacttctttagattagctttctatacttcctaaattagtttattacacttctttagattaattttctatacttctttaaattaattttctatacttcctaaattagttcattatacttctttaaattaattttctatacttcctaaattagtttattacacttctttagattaattttctatacttcctaaattagtttattatacttctttaaattaattttctacacttcctaaattagtttattatacttctttaaattaattttctacacttcctaaattagtttattatatttcttaaattaattttctatacttcttaaatattgtcttatacctctgcaatcttattatggttactcatcaaattattttgctttatagtcaaggatttcatttcatgaactgcaaagtatatacataccattgccgctgctgcatctgctattggtcctgcaaacattactccatcaattcccataaacattggtaaaattactatcaatggaattaaaaataaaatttgacgagtcaaagaagtaaaaagtcccaacactgatttcccaattgatgtaaagaaagttgatgatactatttgaacaccatttataaatgttaagaacaagaaagttctaaaataatgttctgcaaatataaaataagtctcatttccgttaccaaatatagacgtaatttgtcttgggaagaattggaaacataagaatgcaataacagatataatagttgcacttcccactgcaaacttatatgcttcttttacacgattatacttttcagccccataattataccctataattggttgcataccttgtgatataccaataattatagatataaaaatcatatttactttaataatgataccgacacaagcaagtggaatctcacttccataaactgacctagccccataatatgccaatgtattattcataactatctgtgttacagtcattgctaattgattaaaacatgagcttgaacctagcgcaaatatatgtttataaattatactatctaatttaaaacttttcttatgtaatttaatatgttgaaaattctttatataatgaacacttattccaaaagatataagttgcccaataacagttgctaaagcagacccagcaattcccatattaaaaacaaaaatgaataatggattcaaaattgtattaataactgctcctattaacatacaaaacatagaagcttttggtctcccatctgcaagtatcaatttactcattccagtggacattataagaaatggtaatccaattgatgtaatttttgtatatgtgtgtgcataaggtagtatttctgatgtagagccaaagaattttaatagtggtgttaaaaatattgatactactataaataaacttattccaaaaacagccatcaagcatatagaatttcctgctgcttttgtagctttttctgaatttttagcacctaattccaatgaacacttagacgctcctccaattcctaataataatgcaattgcagtacatattgttgttagtggaaaagtgacatttgtagcagcattacccaatacaccaacaccttgcccaataaatatttggtcaacaatgttatataaagcacttactaacattgctataatactaggaattgcgtacttagttaataactttgaaaccttttcatattccaatggctccttatatttttcttccattttccttcgcctccaattttgcttcttcattcatatcaatagctaaaaatgcaactttctttaacattgacataaacaactcttgctcttctttctcaaatgaactcaacaactcctcaacatacccatttgttatttttagtatttcatcataacattctaaagatttttctgtaggatataaatgccatgttcttttatcctttacacctggttctcttgttataaagccttctttttctaaatttgccaaagctctcgttatattactaggattcacaagaattttctcaaatatagtgtcctgtgtaatacctggattattacatatgtgtaatacataaaaatattggctattattgattccaatatccgccaatttcctgtcaatataatttgtattgtatctatttataatggaaacccattttaatagctctctcatattctctcctttaatatctattgtcctcatttttttgcgttcgcaataatctatttgctcatgcaattattttactgctaattttatactttgtcaatagcacacaagtttatatttaaaccataaagttactataaattttatatattagactcttactttaatttaactatttttaaatcttcattgatatttaattaccttttatattaatttttttgcatatttatcaataattcctaattctttttagcttattttaaaaagcatcttgacgtaatatttattatctgtaataataaatatatcgaatcgatatatatctgattgataccaggaggtaatatgttagaatacattattttaggatttttaatggaaaaagaattaagtggatacgacttaaaacaaataatgtcagaaagtacctcgtacttttttgacgccagctttggaagtatctatcctgcacttaaaagattagaaacaaaaggatatatacactatcacgaagttatagatggtagcaaattaaaaaaactatattccataactaatactggtaaagaagtatttctcgaatggttaaagaaacctataaatttttctaaaacaaagcaagaccaccttgttaatatattcttttacaagtatctacccaaagaaataattgaaacaaacttaaaaatgttaataactgaagtagaattacttctaaataaattaagtaaacaaaaaattgatgtagaagaaaatcattgtattgaccaatatacatatatgtatgccacaatgatttatggagttgactattataattttgttattaattggtgtaaagatttactgaaaaatctataagatataatttttagaaataaacatacataataaaaggagatggactttatgaagcttttaatacatgatttaactgacaaagaattagaaaagttattacccaagcttgatgacaatataaaaatacttccaaacacaaaagaaatccacaaatgtattggtcgttttggttgctggattaaaactccttctgaatgtgttgtaaaagattattacagcaacatgggtaaacttataaatgaatccgatggaattattataataagcagatgctgttacggagggtttagcccttttgtcaaaaacgtacttgataaaagcattaattatattcttccatactttgtaataaaagataatatgatgcgtcataaaagcagatatgataaacagataaatttaaaagctatattctatggagattgtattacagaagctgaaaaagaaactgctacgaaattagtaaatggaaatgctataaatttcaatataaaagaacactctgtttgtttctatgaaaatatacaggatataagaggtgaatccatatgaatatagtaatgataaatggtagtccaaaagtaaataaaaataattcacagtattttttatctgaattaaaacaacttattcaaaatgataataaagtttttacatttaaagtagatagcacatctaagtatcctgacgctcttaatgccatacttaattgtgatagattaataatagcatttcctctttatgtagatggtattccatctcatttacttcattttttagagaaatgtgaaaaatttttaaaaacacaaaataaaaaacctattccagtgtatgcaatagttaactgtggattcaatgaaggtgaacataatcatttggcaattcaaatgatagatcattggtgcaaaaaaatcaactttacatgggttcaaggtattggaattggagctggggagatgtttggttcactagaatccgtacctttgggtaaaggacctaaaaaagatttaggaattgcattaaaagaactttcaaaaaatatacttagtgataatatacatatagatgattccaacaaaagtactatttttatttcacctaacttccctagattcctatataaacttatggggaatcatcaatggaatactcaagctaaatcaaatggattgactaaaagtgatatactaaagaaataaaattttacttcaacaaatactaaaaaccgtcaagcacgaataaactattcatcttgacggttttttatgttatttatattcactagacatgggataattcactacaacattgattatctagtctaatatttatcttattctttttgtaaaatccaagttgctccaacaaggtcctgctgtaaatcagtatattcatttttttggctaataacatattgttcaaacatatctttttgagaaggatattttttaattagctcatttgcacgagttataatccagttcatttcctcttcaacatcattttcaagttctaaacatggtatacattcaattagtttcagacctaattctttgaacaatatacaccactcattgtaagtgggatacaccctctcaaaattaagctgttcatttgtagatttatctactacatatgcatcatcaattaaaatgaaccccttactttttattgtaggtaatagcttacttatagtttctttataattacctaaaatatcccctacagctccaaaaatcacacaatcataatcgtgctcaatttttacagaactattagcatcattcatttcaaaatcacacaaagcatcaaccttatattcaatagcctttcttctcgcataatcaataaattcaggtatcaaatcaatacctttgatatgtatattcaactcttttgcaagcttcacagatacagcaccttttccacaagctaaatccaaaacttttgtatcctcattaaaaggtatatgctttctaaataattgtaacatttgttctggtgaacttcctaattcccaaaaatcttgtaataaataaggcaaataaggtaaaatatcagtagtatcagaagttagtgactctgccaatttttcttttacagtattattcattttttcaacctccaaaatttaaattattattcaaaagtaatattattttatatacttcttcataggtactacaaacagtggaaaatgcttttgacctttgtatttttcaattcatttcttttctttatgagctgtaataattgtataactgtgagcgtttactgttataatacaatcatatacacttatataccagttttttccctttctattaataatggcatttggagattctattttagttttacaccagttcactacatcatttgtctccaaagaaagatttttcttaattcttacaacgcctaactctgttgtatgcaatctatctaggtttttaagtaattcgttttctacattcatttttattaaaacactttatcctttgcaaaattaaatctattatttagtactattttatcatagtattgtgtattttatcataatcttatagtaaaactatttctttcctacagactataaattatttataaatacatacttttataaaactttgcctatataaatccacctactttatacataatcccttcttttaaatgattggaacccaaaactgaatttcactcaaaccattcttatcagttttttctccgtattttacaaaatcatataaattattttcattaaactggcaacttgaattaaggaaccattcttgatagatatattctacaacattttgcatactatcctcatttttcccaataaaagtaaaaacaatataattacttttcggtaatacgaatttttccattccattaggaatttaccaaaagtagctacttgaacacctgcaatatatgtaaatgtaggattattttcaatttctttaaaattactataatcattaactccaattaaaaaatccaagtctaccttgttttctatcaactctttatttttatgcaaatccctccaacattttccaataacatgaaatcctttttttactttaccagaatagccaacaatatttatatctgtacaattaacttttttaacatctaaaaccatacctccatgtaacctttttctattattaatatcaaattttaattgtagtggtaaaaaatcttgatgttttctaaaaaacttagggctatgcttaaacatttttttaaaccctgttgaaaaagaacgttgtgtgtcataccccgagattaaagcaatttcaataattggtttttctgtaaaaatgagcattcttgctgcttcagttagtctacgtctttgtatataattatgtatactaaatccgacaactgatgtaaacattctatgtaaatggtactttgaatagcctatctctttagaaattacatttaaatctaacatctcatctaaaagatgtttttctatataatctaaagttttttcaatggtaatcaaattgttatccatatagcacccctcctattttaaagatagcatattattttattttgtttttcacattctttgctaatattttgatttattttatggcacacaaaagacacttctatttgaagtgcctatctactctgtatattgagcttcttatttcaatttattataatcttcaatagatacaggttctagccatttattgaaagcaccttcagcagttacctcgtctacagccaactgctaaattctcttctataccttaatctaacttttccacttcaagtatacaacttgaagttagctctaaatcaatagtttttatcacaacaatttgattttaaatttaaatttattcttttaaattatcatcatctattatagattttcttatattcaataactggtctacaaattggttagcaggagtatttaaaatattctcaggagtatcatactgttgaacaactccatgatttaataccaaagtctttgttcccaaaatcaaagcttcataaatatcatgcgtaataaagataatcgtaactcctgtttttttatgaatttcttttatctctttttgtaattgctttcgtgtaatctcatcaactgcaccaaaaggttcatccattaataaaatttctggagaagaagctaaagctcttgcaatccctacacgttgttgctgaccacctgacaattctgatgggtaacgcactttcatatcatttggcaatcccactatttccatccacttgtttacagcactttttacttctaatttattctttttacttaggagatttggtacatatgaaatattttcttcaacagtcatatgaggaaaaagaacacttccttgtacacaatatcctattcttcttcttaatttaattaagtcctcgtttttgatatctgtttggtttatcaaaatatttcctccatctggcaaaatcagaccattaatcatttttaagagtgttgtcttaccagaaccagacgaaccaattacagtcaaaaactctcctttttctatatctaaattaagattatctattatagttttatcattatattgttttttaatatttttaaattgtataataggtgtcattatatttcctccaatttataaaagacctttcttattcagaaactcacaagcaacttctctaggttctaaattgttgttttctacgtcataattcattttagccatttctttatcagtcaaaatatctccaaccatcttaaatacctctgatagttctggattttcctctaatacttccaaacgaacaacatttccacattgataagatgggtagaaatttttatcatcttttagaactataacatctgaaacactatactgaccatcagttgtaaatataggcattacgtcaatcttaccttcattgatagcttggtattttaatccaatatctaaatcaactgtatctttaaagttcagtccatatgtattacacaatggagtatatccatcctctctctcataaaagtcatattcagctccaaatgtcaatttagaagatacattttttaagtctgatatattttttaaattatatttatctgcaacttcttttctaactgctaatgcatagctattagaaaaaccatacataccagtccattgcattttaagtttagttttgtattccgactgtagtttactaaacatactttcagtatataattcatttttcttaagtaccatattccagcctgtacctgtatactctggataaatgtcaaattctccattctccatagctggctggatattagatgttccccctcctatgccttgtgtaatttccacgtttagacctgtgtttttttcaattaaaatatccaacatctcaccaagaatatattgttcagtcataggtttagtagcaatatgaatagtttgagtctttgaaggattaaataaataagacgtaaagatagttgctataagaataaggcttcctagaatggcaaaaacttttttcctatttttcttttttctttttcgttgaaaaaatttttctaccagccctaaaataaaatcaaatattaaagctaatagagcaataagtatacttccactaattgtcattgctgtgttatttgtcgtgattcctctatatatggctacacctaggcctccagcacctataaatgaagcgataccagctaatgcaattgtcataatcaccatatttctaataccagacataataacaggtagggctaatggaagttttattttatacaatatctgaaaatctgtactgcccattcccctagctgcttcaagaatatttttatccacattagtaattccagtatatgtatttctaaccattggcaataatgcataaatggtaagtgcaataacagcagtagtatttccaattccggaaaatggtatcagaaatcctagcatagaaatagatggaatggtgtatagaaaattgatagttcccaatataggtttagaagaattatgaaattcacttacaataataccaattataccacccaaaacaatcgcaattattatagaaataatagaaatcatcaaatgttctatggatagctttataaaaaaatcacttctttcagataataaggttagaatatcatttatcatccatctctctccttttataagttttacttaacaagatttaaattttaatgtagttaatctttattgtttatacatcagcaaatcgtcatcaaattatttcacaaattatatattaagattataatctgaacctcccatgactgaagtcacaagtgtgtatagccattttttaatcaaacttgcaagtagacacaaaaaagtaactattagagactccatcttcgatactctccataaaaataagaaaaaaggtcagaatcgttaaaatactaaaatttaaacaaatttctgacactttatttaattaaatttgaatatttctcacattatttattactgttaagtttaattatcattttatatacccattatatttattaaaatatcattataattttattatattttatttattatactatatattttgctgttaatgatattttattgttacataattgttttgggataccttcaaatattactctcccgccttttgtccctccttcaggtcccagctcaataatccaatcagctcttttaattacatctatattgtgttcaattattatgaccgtatttccattatctacaatctcttcaattatacttataaaattctcaatatcagccatatgaagacctgttgttggttcatctaatatatacactgaactttccttatttaattcactagcaagctttaatctttgacactctcctccagacaaagtatcaagagtttgtcctaaagtaaggtatccaatacccattttttcaatacattgtaatttcgttttaatctgttttaaattaaaaaactcaattgcgtctaaaacagacatttcaagaacttcaattatattcttcctttgaaacctatattctaaaacttcttttttaaattttttaccttcacaaacattgcaggtactctttatactctccataaaagcaagattcatttctactattccagaacccttacagttatcacaagctccttctgaatttgaactgaataaagaagcatttacgccatttgtttttgaaaatatgcttcttatgttgttcataattccactatatgttgccaaactcgaccttgaatttgctgaaacagggctttggtctataagtacagcactaggattttgctttaaaaattcatccttaatcaacgtacttttacctgctcctgctactccagtaactagagtcaatacacctttaggtatcttaatagatacattttttaaattgtttttattacaatttttaatttctaaatatccactatgttctcttacactttctttaataggaagaaatttacttaaagcattccctgtcaaagtaccacttgtaagtagatttttataactgccttcatacacaacttttccaccatacttacctgcctttggtcctacatctacaacatggtctgcaatcttaataacatctgggtcatgttcaacaactataattgtattccctttatcacgcaatttttttaaaagattatttaatttatacacatcttttggatgaagtcctacacttggttcatcaaaaatatacattaaatcaacaagattactatttaaatacttaaccatctttatacgctgagattcccctcctgatagagaagatgtctctctatccagtgttaaatatccaagacctatatctatgatactgtttaacttttctattattcctttaattaaaggttgtgcttctggctcatttatacttttaataacttcagccaattcatcaatttgcatactagttaaatctgctatattataaccattaattaaagacctatatactccttcattaagtcttcttccatcacatataggacatctatcttctataagaagtttactcaattttttcttagtagcctcagatatttctccatctctacttaagtatagacgattaaatttaaccattaatccctcatatgtcatgttagtttgaccagcattttctatcttaatcttttctgctttaccatgcaaaaacttttccaattctacttctgaataatcacatatcctcttattaatatcaaaaaatcctgattcagcgaatatattccaatgccaagaacccactccaaaccctgaaagcaatatagcaccttcatttaatgatttattcatatcaagaatttggttcatattaggaactagcttttttccaagcccatgacagtgtgggcacataccatcaatatcattaaaagaaaacatattagcattacctatatactcactaccaaaccttgaatataaagctcttaaaaaggaatttacatctgtaatagtacctagggttgaccttgaatttccaccaagtctactttggtctatgataattggtgttgacagattttctatacaatcagctttaacctctccatacttaggtaaaaaacttcttacaaatgtactaaacctttcatttagttggcgttgtgattcttttgcaattgtctcaaatacaatagatgactttccagaacccgacacccctgtgaatatggttatttttctttttggtatttttaaggaaatattgttcaaattattctctttgcaaccttttaaaattataaattcattgctcatattttacctcctgcattatttttctttaaattatttagagaaaatcgtaataatagttgttagttatacataagtgaaatactattttattagattactcctttttttataaacacaggtcaaattatagcatgtagattttatctggtagtatagtgtagggtttgatttttataaaaaatacagttattttatttaagcgtaattgcatctattctacctaaatatcatcattatatatgagtgttaaattatataaaattcttaagttaataacctcaaaatggtattagttacataaaaaaagtatcttgcctatgattttaaaaccataaataagatactatgttttacactgtttcttctttcacaaataattctatacaattattcaacttaactttaaaattttaaacattaaaaacctctatctttaaatctttaaataaaactaaatttccaataccttcaaaactatagaaaattccaatcaacttatcaaacataacttactacttataagaaattaatcttcacttaatacagacgtaagttcagggtcatttagaagatgttcaaaataactatgtgccgaaatatatcctataccatacattttacgctttgaatttacaaccttatattcataacaagcactcttaaccttattgtagtcatcaaaatccattgctttatagatagctctttcatttcttggtatatactttacatattttggcttaacaaaatacaagtcatcttttatcttaccttcacgtttaagtttctttaaaacttccccattctttctatgcattatatggtcatcatacttatagtgatgggctatatgggtcacattgcctttaaacttatgttcaaaatccaatatagtcttttccattaattcataatgtgtgccttcctttttatctatatctgcaagtataatcacattttgaggtttcactccaagctctctcaaagctgatttaaactcattatttctaagctcttccttttgcttcctagttaagtttctaaattttgtgttagctttgaaaacgttaactccagaaccatctgatactaataccacatatacattatcaacaccacactgttttatagcatctacaatggcacttcctccccataaaacctcatcatcttgatgttgaggataaaacactgctgctgatttaaattttctactattactctcaggaataggtatttcaagttttccgttaaaattctttgcaattaaaaatatcatcaataatattaatatacttattcctatgtacttcgttttactttccatatttaaaattttctccttcttctgaacctcccatgattaaagtcacagggttactacttcatagaatttcgtataatcaactcaaatatcttataaacctttgtgtcaatcaggtctaaatatacaaattattttacaatattttattgtttcatacaatctttgacacgaactataataaaataaaaaagccttctaactgcaacattgcaaatattacagccagaaagcttcttaattcttaaaatttattaagcttaaaaatttattaaatttattttttaatataaatatgtctattattaataaattatactttaattactatatcaatacgactttactatatcactataacattacttatatcaatacaactatttttatagcctacatttcctttaaaatttcaagcaactcttcttcactatacatatacttcttattacagaactggcaaccaacttctgcttttttatcttcttctattatctgagccaatgattttttaccaattgcaaccaaagcagtttttactctttcttttgaacattcacacataaaccctacttcacaggtatcaagtattttaggttccaaaccatccaaaacaatatttaatatatcatctggtgattttccttcttttaacatgttagttatagaaggtaatttagctacattttcctctaacttagcaatagtctcttcttctgcatctggcattaattgaactataaatcctccagcaaactctacttcatcttcttttgtaagaacacctaaagctactactgatggagtctgctctgatacagcaaaataataagtaaagtcttctgcaatttctccacttaccaatggataagtcccattatatggttctctaagacctaagtcttttataacttttacaacaccttctgtacctactgctgctgctacatttaactttccatttggatagtcttcaacctctacttgtggatttcctacatatccttttaccattcccttagaatctgatgtggcgataatagttccaattggacctccaccttttattattacagtcaatttatcactatcatttttcatcattaatcccattatagatgtggctgttaatgttcttccaagtgctgctgttgctacttttgtagtttcatgtaatcttctagcttcttctactgtatttctagtagttgcgacaaatgctctaacttgaccatttcctgatgtcgctcttagtacataatctctcattaatattcctccatgtcccgttaattgtcttatttttattatattactaccttaattttaatctataagtacttatctatattaaccttgggcaaaacccattttattttaattttactaagcaatagttattatattttaatttttatctatagaactttataattattagaaaataaaagtcataaagtatcatcactttacttttaatctataaaactgcattttctatatttttatatcatggttatttttaataattatcttatatagtcaaaaatatcttattttttacatacaaagaagattctttgactttcttcactgggtttgtcaaatgtaaaatccccataatattttatatccttaaatccagatttttcaagcatatcaactatctcatcttcagtatatgctctttgttggtgtatctcttcaaatctttcaaactttccacattcatctttaataaagaatgtaagttccatttcaattagattctcttcttcatcaaagtaattttgccacatatacgctatatcttctctattttctccatacatgttatttcccaatatgttggctaatttataaaaagaacttatatcaaatatgaatattccatctttctttaataattcatatgtctttgaaaatacattttccaaatcatcatcataagttatataattaaatccatcacaagcacaaagcacacagtccaaatcagatatttcaaaatcaagctctgatatatcttgttgaagtaaaactaattctactccttctttttctgccttttctcttgctacactaagcatctcatcagatatatctataccagctatatcgtaattttttttagtcaatggaattgtaagattacccgtgccacatgccaattccaatatattttttacttttacaccttcactatctattatatcttctatatatttaacccaaccattataatcaacttcattcataagttcatcatatacaaacgcaaaatcactatattgactcatcctttttattctgctcctccacaatctttttaagcctctttttgcgtgatgtaagcatacctccaattcttcctgcttccttagctgtaagtcctgcccatccacgttcaccaactttatccataagacctagttctgaggctatctcatatttcattatatcatcatttgtcaatattttagtattcttgccattagttatcttcttttctctttgtactttttctttcaaaaaaatcaccccttcttatttgtatttttgtcaattaaaataaatttatacaaatatataaggggtatttattaatacattttttttaaatttaggtatttatgctttttaatctttataatttatcttcctaatctattgcttctttgtattttaataattttgaataaacattcaatgcatttacacatatcttttcatcaaaattaaagtttatattatgaagaccatttacaaatcctttttcttcgtttcttgaacccaacataaaaaataatcctggaacttctttttgataataagaaaaatcttctgatatcataagtggctctaactctacaacagtatcacttccaatagcctctacaaactcttgatacaaatccttgtcatttttaacagcaatataatcatctataatatttatattaaccttacagttataagccaattcaaaccctctagcaagttctctaactctaagcttcattttctcatacacttctgggctgaaacatctcatagtaccttccatctttatattttcagctattatatttcttctagctcccccttcaattctaccaatagtcaacactgcattgtctattgggcttatatttctagacactatagtttgaagtgagcttacaaagtttgaagctatcactataccatcaataccattttgtggcatagccccatgtccacttttagacactatttctatgtcgatatctcctatttgagccataaaatagccttctcttgtacctacataaccttctggtaactctggatatatatgaagcccatatatttcatcaatattgtattttctaagcactccttcatctattaaagcttttgctcccccaggaccttcttctgctggttggaatataaatactatattatcatttaagtcttctttattatcatttaaatactcaattaatccaagtaatatagtagcatgtccatcatgaccacataaatgttttaccccttcttcactatgaagaccatctatgtcagctctaaaagcaatatcttttttaggtcttttaccttctattacacctactatacctgtttctaaataaacttcatactcaattcctaatttatcaagataatctcttatatattttgaagtcttatactcttttctcccaatctctgcaataggatttaatgacttcctatgtttataaagttgttcttgtaaatatgatgcctctctcatgtaatctcctccaatttctaatttattaaaaaatatttctatatttctttataattaaaatattatatagcatgttatactaattaaaaataaaaagctaaattgaatataaaaatattttgcattattaaataattcaccattaataataattcccctgtttcataaatcaaaacagaggaattattattggaaaattttatttttagcaagagaagaaatgtttagcaagtccacccttagctgtttctttgtacttatccatcatatctataccagtttctttcattgtttcaacaacttggtctaaggagacagaatgtgagccatcagttaataatgcataattagctgcatcataagctctttgagctgccattgcatttctttctatacatggaatttgaacatatccatatacagggtcacaagtcattcctaaatgatgttcaagtgctatttctgccgcatattcaatatggtctatagttccaccttttaagtatgctactgctgctgctgccatagaacaagctgctccaacttcaccttgacaccctacctctgctccagatattgaagcattagtttttattatattacctattattccagctacaagtagtgcttcaattattttttcgtcatcataattatagaaatcctgcattgcaaagaatattcctggtattactccagcagaaccacaagttggtgctgtaactattatattaccagaagcgttttgctctgaagctgctagtgcatatgcatatacaagtgttgagaagctcttatcttttttatatgcattataaaatgtacttgctcttctttttaataataacttgcctggtattatttcatctgtacttagtccatcatcaatagattttctcatagcatcttttatagtttttatataatcttttatgtcttttggttcacattccaacacaaaatctaccaaagtcttattattttctttgcaccattttactatctcatccatagtatctaagtgatatatactattgcttttactgtttctttgaccttcttctgctatagtccctccacctacagaatatacagtccattcagctgttacatttttatctttatctaaagcttcaaacttcatcccatttgggtgaaaatcttttataatatcttcttcccaaacaatttcgacttttttaggtgctatagttttttcaattatatagtcagttaagtgacctttccctgtagctgccaaactaccatataatattgctctaaaactttctgcatctgggttttcattcttaaatctctctgctgctctttgtggtcccatagtatgagaacttgaaggtccacttcctattttaaaaagttcctttaaagtatccatattattcctcctaaatttacggtattattgcttattgttagattttacgcacatatttattataacctaaatatattaattattagttattaaattctcataaaatttattttttatttccattttggtatattttattaaattaatatgcatattttgagaataaaacatttatttaaaatttttctaatattaatataatataaatatcttatttaaacagttaagatattaactatacctattaaaattaattaatttgtactataattattattgtacttaaaaaattaaatttagataaaaaaggagatttgattatatgttatttaaaggttctgctgttgctttagttaccccatttacagaggataataatgtcaactttgaaaaattaggtgaattaatcgaatatcacattgagaatggcacagatgcactagttgtttgtggaacaacaggtgaggcgactactatgagtgaatctgaaatttttgctgtaataaaatatacagttgaaaaagttaataagagaatacctgttatagcaggtactggttcaaacaatactatgttgtctgttcatatgagtcaagaagctgaaaaattaggggtggatggtcttttaataataactccttactataataagactaatgagaaaggtcttaaacttcactttgaaacaatagcaaatagcgttaagttgccaattattttatacaacgtaccaggaagaactaaagtgaatataaagccatctgttgtggccgaacttgctaaaatagataatatagttgctgtgaaggaagcaagtggagacttagctcaagttgcagaaatagctaaattagtacctaaagactttgctatatactccggtaatgatgatactatactaccactattatcattaggtggaagtggtgttatctctgtacttgctaacatatgtcctaaagaaacacatgatttagtaactaaattctttgaaggtgatattgaaggctcaaaaaaattacaacttgatatggatgctttaattgctgctttatttatagaagtaaatccagttcctgttaaaactgccatgaacattttaggttttaatgttggtgatttaagacttcctctagctgaaatggaagaaactaatcttaatgtgttaaaacaagaattgacaaattttggatttaagttttagcaatatttatataaataagttgattttttcttaaatatgtattattattagaataatcaaattttaatatcctattaacctagggtagaggtagctgtaactaagagtatccaatagtagctggcaggtgttaatgattggaaaaaggatttacagccgaagaaaatatttcttgcaataatattttctgggattgcacataacatgtgtaatactgtcacttatttttgtaggtgatgagctacagggtttactttgagtgataaattagacgtacaaagtatacctttgtacgttttttgtatataattaaagttgttaatataatattaaagtttttggatatataaaaatattaacatatcttacttgtataactaaaataaaataatgttttaataatttaaaattggggtgaatttatatgaaaaaagtaaatgtagcaatagttggtgctactggaatggtaggtagaacatttttaaaagtattagaagaaagaaattttccaatagaaaatctatttttattctcttcttctaaatcagctggttctaaagtaatgttttgtggtaaagaatatatagtagaagaattaaaggaaacttcatttactgatagaggcatacaaatagcattattctctgctggtggaagtattagtgaaaagtatgctccaatagctgcttcaaatggaatcttagtagtagataactctagtcaatggagaatgaatccagatgtgcctttagtagttcctgaggttaatccagaagccataaaaaatcataagggtataatagctaatcctaactgctctactatacaagctatggttccccttaaagctcttgatgataaatacaaaattaagagagttgtttactctacttaccaagctgtatctggttctggtgttaaaggtgttgaagatttagagaaaggaatgaacggtaatcctactggattctaccctcatcaaatctcttacaactgtcttcctcatatagattcattcactgaaaatggatacactaaagaagaaatgaaaatggtaaatgaaactatgaaaatacttgataactatgatttaaaaataactgcaactactgtaagagttccagtaaaaaatggtcatagtgaatctataaatgttgagtttaacaatccatttgagttagatgatttagtaaaaacacttgaagaagctccaggtgttgtagtagttgataatcctgctaaaaacgaatatccaactgctgtagaatttgatgatagagatgaagtatttgttggaagaataagaagagattttagtgttgataatggtgtaaatctttgggttgttgctgacaatataagaaaaggtgctgcaactaacgcaattcaaatagctgaaatggctttatcatacgatttagtataatatacaaacttgtataaatatataattttgtaaaatattaatagtaactcaaaaacaagcattagaagtaactgtaatataaaacacaaaaataaaaaagaggggattgattttatatgatatttaaaggttctgctgttgctctagttacaccatttacaaaggataacaaagttgattttgacaaattaggtgaattagttgaataccaaatagctaatggtactgatgctatagtatcttgtggtactactggtgaagctaatactatgactgatgaagaacaacttgctactattaagtatgttgttgaaaaagttaataaaagagttcctgttatagctggaagtggttctaatgatactatgcactcagttaacttaagtcaagaagctgaaaaattaggagtagatgctctattaataataacaccttattacaataaagctaataaagctggacttaagcgtcattttgaaacaatagctaacagtgttaaacttccaattatactttacaatgtccctggaagaacttgtgtaaatataagtcctagccttatagttgaacttgctaaaattgataacatagttgctgtaaaagaagctagtggagacctaggacaagttgcagaaatagctagtttagttccagatgactttgctatctactctggtaatgatgatactatacttcctttattatctttaggaggtcaaggagttatatcagtacttgctaatgtttgccctcaagaaactcacgatttggtagctaaattctttgaaggcgatattgaaggttctagaaaattacaacttggtatggatgctctaatcgcagctttatttatagaagtaaatcctataccagttaagactgcaatgaatttattgggattcaatgttggagatttaagattacctctagcagaaatggacccagcaaatttagaagtgttaaagaaagaattagttaactttggactaaaagttaatgcatagtaaagattaatgcatggtaaaaagtaagtttggtcaaaagttagcccttaatcataggaggaaattatgttaaaagttatagcaactggttatgatggaaaaatgggtaagattttagccgatactataagagaagataatgaattagaattggtttgtgttgcagctagaggtctggatagctatgaaggcgaccttaaaatttatgaagatatgagtactatagttgaggaagctgatgtagttatagatttttctcatcactctaatttagataatatcttatcttacgttttaaagactaaaacacctttagtaattgctactactggatataatgataacgaaatgaacaaaatacgtgaagcggctaaagttattcctgtattccaatcatataatatgtctcttggtgtaaatgtattagtaaaattggttaaagatgcagctaaattactagaaggatttgatatagaaataatagaaaaacatcacaacagaaaagtagatgccccaagtggcacagctgttatgattgctaacgctataaaagaggttttgccaaacgttgaaaataattatggtagatatggtcgtagtgcaaaaagacaaccaaatgaagttggtattcatgctataagaggtggaaatattgttggcgaacatgatgctctatttgctggagacaatgaggttcttacaataagccatcaagctcaatctcgtggtatctttgcaagtggttctatagctgctgccaaatacttagttaagcaaaaaccaggattttataatatggacagcatgttgggataatagtataaatataataatacacaatataaattaaacatatgcaatatagatataataatacgcaatacaaatcaaacatatataataaatttatttaatactatgtctatacaataaaaactaactaaaataaaatataaataataagaagtaagtatatactaaaattgacaaataagtatataataaaagaaatataatgaaatacaaggagaattaacaaatggtaaatttaaacgatgcttatgaaatagcaaggtatataaaagaagttaaaaagaaaacacctgttaaggtatatgtaaatactaactctttacacttccaatcaactgataaatttaaggtatttggaagtaatggttcttatatatttgtaggtgactatgaggatataatggaagtattagataaacatgggaatgatataacagatactcatgtagaatatgatagaagaaattctgctattcctctaaaaaatactttaaatgaacatgcaagaattgagccaggtgcaataataagagacatggttactatagaaaaaaatgctgttgtaatgatgggagctgttataaatataggagctgttattggtgaaggttctatggtagatatgaatgctgttattggagctagaggaactcttggtaaaaatgttcacttaggtgctggtgctgttgttgctggtgttttagagccaccttctgctactcctgttatagttgaagatgatgttttaataggagctaatgcagttattcttgaaggtgttagaatcggtaaaggtgctgttgttgcagctggtgctgttgtaactactgatgtagaagctggtgccgttgttgctggttctcctgctaaagttataaaaatgaaagatgaaaaaacggctgacaaaactaagcttatggaagaccttagaaatttagactaattaaatagtactatattattaattagaaagattaattaaacaataatatactaatttaaaaaattaattaaaaaggtgtctctgtatgaatttaattcatcagaggcaccctcttttttataatatttttatcttttatttataatcattttatttttttacaattctcttattcattcttatatcatttttatttcttgatgacaagtatttttatttccttcaatttttcaatatatcaatgtaataaactattaaactttttataatttaataaatagaactgctgtttactactggttgtgcatctttattgccacaaagcacaactaacagattacttaccatagctgctttacgttcttcgtccaaagtcacaacattattttcacttaaattagtcaatgccatctctaccatacttacagccccctcaacaatctttttacgtgctgctattatagcctctgcttgttgacgttgtaacattgctgctgcaatctctggtgcataagaaagatgagtaattctcacttcacacacttcaattcctgcaatgtcaacccttgattgtaattcatcttttaatctatctgctatttcctgactactaccacgaagagatttttcatctccatcttcagatacatcatatggataaagtcttgaaacattacgaatagtagaatcacactgaatagataagaatgtattataattatccacattaaatactgcctttgttgcatttataaccttccaaattacaaccactcctattataattggatttcccaataaatcattgactttctgcttttcattattaagagtcattgtttttaaagatacttttttgccccttgaattagttgatatatctaccttttcatcagatgaagatttcgatacattaattcttgatactgctgggtttattgctgaacaaaatggattcacccaatagtacccttctttttttatagttccataatagttaccaaacaaaactagaactatagcttctttaggattaatcatttttagcccaaaaaataggataaaatctactactataaatacaagtcccaaaattaacataagtgaacctattccagtaaatccactatcaagttttactatcccaaaaaccatgatacctattgaaactactaaaaataatacaatcattatcaaagctgccactccattgaatacttttgcgtctttctcttgataagttttttcttcttttaacatatctatcactcccatctcagtatattaagttaagatatttctaatttaataataacacttttaacaattaaattgttgaatttaaaattaatactatatgtttatatattttttatacatctttatgcatacatgtatttagttattttaatgtattaatattgatttccaaataaatcatatgatatatgaatatggtatctcaaaattaactttttagttcatggggcactctttttgatatgaagtcaaatatatttttatcatttatacaatgaaaaagaagtttatctatattttgaaaaatccacttaaatttttttaatgtaagataaattgtaagcttattatcactaatattattttatataaataatattagtgataaaataaacttatagaaatataacaaatttttattaatttcataggaggaatttatattgaaagttataattaatggctataatggaacaatgggaagagttttagcagaatgtgtaaaaaaagataatgaattagagttggtttgtggtgtagctaggtctgctgatgaaaaaggtcatcatagtgatacaaagctttacaaaacaatgactgatgtaactgaaaaaactgatgtcataatagacttttcacatcatgagactttagagccaatattgtcatatgctctaaaaaataatacacctgtagtattagctactactggatatgatgaaaatgacttaaataaaatagaagaagcatcaaaaaacattcctatattattatcatcaaatacatctcttggagtgaatatattaataaaattagttaaggatgcttcaaagatgttagaaggttttgatattgaaatcatagaaaaacatcacaatagaaaagaagacgcccctagtggaactgctactatgatagctaatgcaattagagaagtcttgcctgaaagtgaaaatacacatggtagatatggtagagattgtaaaagaaaaccaaatgaaattggaatacactctataagaggtggcaatataatcagcgaccatgatgtcatatttgcaggtgataatgaagttcttacattaagccatcattctcaatctgatgaagtatttgcaaacggttctatagttgcagctaaatttttaattggtaagcaatctggactttataaaatgtcagatatactaggataagttttgtacataataaatctcaatctatttaggtattcatattcatcaatttgaatatctaattgattgagatttctattctaaaagtttataaattttatgcttaccttttaaatataatcatttttcttaaagattatcttatttattggtatatggaattatattgtttattattttatagtcctttcatcatataaacctattaaatattatcctatttattggtatatgaaatcatattgtttattattttatagtcttttcatcatataaacctattaaatattatcctatttattggtatatgaaatcatattgtttattattttatagtcttttcatcatataaacctattaaatattatcctatttattggtatatgaaatcatattgtttattattttatagtcttttcatcatataaacctattaaatattatcctatttattggtatatgaaatcatattgtttattattttatagtcttttcatcatataaacctattaaatattatcctatttattggtatatgaaatcatattgtttattattttataatcttttcatcatataaactattgtattctataaactgatacatacccagctggagaagtacctgtcgtgcctgaaccaaatgtaaagcttaaagtaacagctgctgctctagcatcaactaaaaagcttaaacttacacttacatctgatgaagtaagcgtatttactgcttttgcaataaagttattttgggctactccattaaagttagtagtaattgacataaatcctgcaagtgaaagtatggcacgtataccgaaagatacattgtatatccctccaactgcaagatttatagtactacttgttggaaaagttatattagttccatttataaatgatgaattaaatgtcactaatgtattattccctaaacttgaagaagatactgtaaattgtgcattgtttgctgctaacactcctgttgctccggtcgctcctgttggacctgttgctccatttgctcccgttgctccggtcgcccctgttgctccggtcgttccatttgctcctgttggtcctgttggacctattggacctgctactccatttgctcccgttgctcctactgctcctgttgggcctgttgctccatttgcccctgttgctccggtcgctcctgttgctcctgctactccatttgctccggttggacctgttggacctattggacctgctactccattcgctccagttgctcctactgctcccgttgggcctgttgctccatttgcccctgttgctccggttgctccggttggacctactgctccatctgctcccgttgggcctgtcgctcctactgctccggttggacctattgccccagctactcctgttgctccggtcgctcctgttggacctaccaaaccatttgctccggttgctccggttgggcctgttggacctaccaaaccatttgctccggttgctccggttgggcctgttgggcctgttggacctaccaaaccatctggacctgttgctcctactgctccggttggacctgttgctcctattggacctgtggcacctgttactccatttgctcccgttgctcctatacttccggttggacctgttgctcctgtatttcctgttgggcctgtagcacctgttactccatttgctcccgttgctcctgttgctcctgttggacctgttatcccattcgctcccgttgccccagttgctccggttagtccggttgcaccatttgctcccgttgctcctgtatttcctgttggacctgttattccatttgctcccgttgctcctgttgctcctgttggacctgttatcccattcgctcccgttgctcccttgtttccggttggacctgttattccatttgctcccgttgctcctgttgctcctgttggacctgttattccatttgctccagtcgctcctgtatttcctgttggtcctgtagaacctgttgttccatttgctccagtcgctcccatatttcctgttggtcctgttattccattcgccccggttgctcccgtatttcctgttggtcctgttattccatttgctccggtcgctccggttgcgcctctaggccccgtcggtcctgttggaccagtagcacctgttggccctgttggacctacatcttgatataaacttggacctgaaatatcactcatataattaatcctccttttttaaagttagagtattactctataaatattgagtattactctatataattatatgaatcgacaatttcttatgtgataatgtatctatttgcttatatcaacatatatgctttgattcttaaatttcattacttttttgtaaaatcttttacaattattagtactcttttacaattattaatacaattaaaaaactcatttcccatcaattatttaaaatttttttattatgttataaaaaatagataattaaattgcataaaattaatttaatactactttaattactttttaaataaaaaaacctcaacacgattaataaaaatcatattaaggcatccacaaaattatataattgcttatctatcttcatcagtaacattgaatatataaggaacatttctataataatcaccaaaatcaaacccatatccaaccacaaacttatcttctatttcaaatccacaataatctggcactaaatcaacttttcttctgcttggtttatccaaaagaacacagcattttaaactagcaggatttttagcttttagatgttttaacacaaaatccatagtaagtgcagaatcagtaatatcgtctacaaccaaaacatcatatcctgctatatcagtagtcacatctgaaaccactttaacctttccagtactttcttcattgtttccataactagatgtagtcataaaattaactctaagtggtaaatttatatttctaactaagtctgcacaaaatataaagctaccttttaatagagaaactaccataagatttttatctttataatctttttctataattgctcctaattcccttaatttatctttaattttttcttctgaatacaatacttcccatttttttgtttctatatccataaaaagacctccaattgtaataatccttcttaattttataagagattgctcactttttcaatactcttattcaatattagtcaatattattgagtttttatgttcattcaacaattattaacaatgtatcttatattttaagtagttcatatatccacactaaattacatactatatattttagacaaaaaaagaaaaaacttgcactaacaagttttttctattatacataaatttatacataatcatattttattagagggtactaattaaatttatttatgctatttttgttatacctcataatacaaaacatattataaagtactagtcaactttattcatatcattcattacatttaagattatctcatctgttatagacatacctttgtcacttactctacctaagttttgtatactttgctcaacacttgaaccaactataccatttagtggtggtacaaaacaatcttgcttagctattatagcactttgtatagctgcagatgctgcagaagataattttaatgcacaaccagctttcgcaccgtcacatatcattccacttaagtcagctatcatattttctatagctccttctatttgcttttcagtaccattcataagccaagagataccagcagttgctccagtagaagcagcaacaccacatccacacacagcagataatcttcctgtatagttcttaatataaccagttactagatgagatatagctaaagcctttgctagtttttcatcagattgtgggaattttttattataagcaacgattggaagaattgctgttaatccatgatttccacttccatttgaactcataacaggcatttttacgcctgccattcttgcatctgaagctccagcagttaacatcattgcataatttataacatcattacctaaaagaccttcttctatagactttttaattccatatccgacaccaataccagttttttgttttaatccatattcagccatctcttcattcatttttactccatctagtaaaaattctatatctttaaaatcaatttcttctacattttttattaattcttgtatagttactgtatccattaaactttcagctttttctgccgcatcatttgaagctgatacttttggttcattgtctaataatacttctccatctttttctaagaacgtaaaattatcatgtttagttcttattctcactttagcaatatgattttttccttttaacacaacttctataaatactttctctcttgtatcagcaggtgttattgatagtggagtattatccatataatcctcagctattttaacttcttcttttgttagagtttctaacacacttaatccattttcagaatggccacctactatacctagagctgctgcaatttttaatcctaatctttcagtacctggtatacctacgcacatgccatttttgtagatactaggactaactaacatacgattttcaactatttcttctcctaataattcctttgcctttgcacatgctagagctaaggctactggttcagtacaccctactgctggtttaacttctgcctttaacatttccactaattcttttcttatatctctcattatatataaacctcccaattaagtttagatttagtactcaaataattaattaaataatttcttatctatatttatagcaaaatacatgccatattttttatatctttttatatttttagtcttatattctataaccattggtatgactgcttctatttatgtattttttttatttacatagagtatttatattctttaaaatggagaaacatatgacaatttcgcaaaaagacaaaaaaaagtctcagaatgagattctatatcattttgagacggctcaaatgtgttattttttaacttataaaaaccattttttaattcataaaaaaagattatgcaaaacacttatagtataagtttaaagctttctttaaagttatgaatttagaaaaatttaaattttatatagctttttattatattactatgaaattatattgtatttttcaatttttctatataatgtagctcttgatattccaagtgctttagctgttaattctttatcttttttataatctttgtacttatttaaagcttttattatctcaatcttctctagttcatcaagtggaattatcctatcgcttttaacttctaactcttctacagaggtattcttaattttttgaggaattacattcattgtgattattgaagaagaagacatattcacactatattcaataatattctgcaactctcttatattccctggccacttatattccatcatagcatcaacaaccctgctatctatgtcaataacatttttatctaatttttttgaatactctttaaccatatgcttgattataagtgggatatcttcttttctctctcttaaacttggtaattttataggtataacatttaatctataatataaatcttctctaaaagtgccattttgaaccattttttctaaatctttatttgtagcagcaataattcttacatctattgagacatttgatttacttccaattttattaagttccttttcttgtaatactctcaataactttgactgtaaatgcaaactcatatctcctatttcatctaaaaatatacttcccttatgagctacttcaaacattccaagctttccaccttttttagctccagtaaaagctccctcttcatatccaaataattcactctctaataaattgtctggtatagcagcacagtttacagctataaaaggattatctactctattgctatggttgtgtatggctcttgcaaatagctccttacccgttccactttccccagtaataagtactgttgatgttgatttagaagctattagggcttcctttttagaatttcttatagctacactttctccaattatgttttccaattttattctataatctttattcatcttattgtagttttttatagcatctcttttatctataaaatcaataacatatccctttaactcattttttaatactattttattgatgttgtatattcccttcgaatcatatccgtatcttttataaaaaaaactacacgatttgtctttcttaaagttatttatagaaggtttctttataaaatctaattcgacaaatatgtttttgccagttatactatcctttatattgaaaagctctttaaattttgaattatatttatcaatttttccatccacatcaatagacacaacagctttgtccatattgtttaatagtgtctctaattttttcttttctaattcaagctcataagttttaatttgtgcttttaatttattagatattaagtctgccattttgcctaaaaagtttataagaccacttttattattttctataatttgtgcttgttcttttgtaaaggctataaggcctataacgccatgagaatcgccatcacatataataggacaacacacctctgcaaactctacacaagccccacttttatagcattccctacatacatcactactctttgggtcatcaattagtattgtgatctgttctgtaagtgattttttaaaagccgtatatttatctactttctcacctattttgtctatatatactcctgtacctgcaatcctaaataactccttatttactatagttacatctatattgagtactgatactatagcttcagctatattttgaatatcagattttatatattctaaacctatcataaccatcattccttatttttctttaacataagtatttgtcttatttctttaagaatcaagtatatcttatttaaagtaaattggattgacatcaggattacaaagagcataacaattattattaactcataatttatttccatctaaacatctccttataacaaaagactaggcttaacctagtcttttatattatatccatatttatattttaactcatttatcttctttttcccacataaatatattttaatttatttgactctttaatcataccatcaaagtttaatcttgaaaatatattaaatacttcatgtggatagtgaatctttgcaacagaaccacaaaatttatgtttaagataatttaacttaacttttaaattctttaaatttaaatcctctaatataacctctccattgccctttaacactctttgtatttcagatgaagctttttcacaatctgtaataacattaaattggtcaactattattatcttgttgaactgattatcatcaaatggtagaaactctaacttacctttaactacattgcaattttcattatacactagagaataacagacatcttcataattactattctccagtatagttacagaagttccaagacctctcaatctcttgcctaggtttcctatatgaccaacaagcaatattttatcacctacattatactcaattgtatccaaaaaacattctaattcatcagatgtatatttagctttaactggctgtttatttatctgacataatatgcttttcacaatgcttcacctcttcatttcctcaattataaattatgtacagattacattataataaatggcgagcaactattcaagagatatttcattagtatttttttaaacaatctttatacattttaatatgatattataccaaatttattaggattttattcataaaaatcagtctattttttatgtttattcattgttattttcatccaatttttttattttcgatatggatacttcatatgccatttttttgaccacattattttcatctatttttttctcatattctctactttgaaccctaccccaaagctgtattctatcaccaacctttagattctttgcaaatttagcatttctaccccaaactattgatggtatataatcagatttattataaggtctgtttatagcaactaataaatcggttatttcccttcctaaaggtgtcttcctatacacaggttccttacatacatatccatctaaaaatatactattagggtctttattttcctcgtctatgctttttatttctctgacaaacactgtaagcactaatctatttttattatttaatgttttgttatatgatcttaattggcctacgacattgactaaattttgtttatcaaggtcaatatcttggagaagtctttctgatacagtcattggaagtatatcaaaagaatcgcttagtctgtttatttttattttcatattataaaatttttctccaaatatctcatggctaaattctagcttattgtctaactcccctcttaagtttactacgttattctcatctttaacagctatcatattttatccctccacaattgttaattcttatatttctggtatcagcttatataataaatatatttataagggatgtattttattacaaatctttgattgctgtttaaaagtttttatttagttataaatttcatttaatatttcacttttataattataaaattattatctttttgtactacatatactaattaaactacctatttcagttttgtattaattataaaaatcctattatataattaataagtcatatataacttaaatttattcactctatataagcaacttcaacgaattaaatttattcaaataattcagatgaatattgagtcattataaacttatttttcttaattataagttatattagacttattacagcttatatttttattaatctgtattaatatatgaacatttattgaacttattgattataaaatttaaatatttagctttaaattatgctttattctttgaaaatacaacgttttttacattaaatctactaaatcactatatatattacataattggcatgttaattgctttatattaatttagcaaataaaaaactgccctaaaatattaattcaatattttaaagcagtttataatctttattattagctgtaatatttaataaacactaagtagtctttaactaagcagtctttttgtttttatttgcagccattatcattgtagcagaagtataagctataactactattactaatgcttttaatatatccattggtagagtttttactatatatgcagctacgaaaactcctattaaaccacatatagctattataactgatgcttttttagtatatgcatcttcttttataaatttcatacttgcaactggcattaataatgcacaagaacccataactattgggaatgcaacttttgcagacattcctaagaaataaaccattgccatacctggagcatatagacctataccagctgtcattaaagctcctagtataaagttacctattacacctattaccaatttaacaccagtaagacctaattcatttcctccacctggtaatacgttaatccaaggatgacctaataacattaatattgctgttaatgctaaagttacacccataacaagttgtatttttctctcgtccatcttagctattattcctgcacctatatatgaaccaactgctgctgccacaaccatagatactaaagtaacaccatcaactggtatgattgatgtaaatatgaatgcttctgtaacaactggaatagtatgtgctacgtttaatgtaccaggcatttttttatctggtatatttaactttaaagcctttgacattgctattgttggagcaaatgaccctattcctaatgtatcaaagaagtctgttataaatcctgttacagcaacttttggagtactttgttcttctagtttcccctctttgtttgctttagctacgtctttaccaaacacaactgcaaagattgctgcgaatactacatataatgcctttaagattgctaccataatccatcctcctatttttttattttttcatatattctgaatcttatagcctaaaagctatagaatagcaaccgacaagtggctactattctattttaatttcctaatttatttattacttatttaagaataaatccatgtttaagtgggtcttcttcatctattacaaaatgattaaatccagttatataagcagaaccagttattttaggtactacagcattgaaatctgcaactttagtttcttcaactatttcacctttgaataaagttcctaatatactttcatatacgaatttttctcctacttttaattcacctttagcatgtaaagtagctaatttagcacttgttccagttccacatggagatctgtcaacttgaccttgaccaaatataactacatttttgtaagtagcttctggatgagttggctcatcatatatttcaactaagtctacagtttttatatgagctaaagttggatgttgtatttctattttctcatttattatatctctaagtttcatagctagttcagttaatttaccagcattttgaggttcgatttttaaacctaattgacttgcatgtattatagcaaagaagcttccaccaaatgatatgtcaaatttaacagtcccaacacctggtaagtcaacttcaacaccttctttatataagaaagctggtacgtttaagaatgatacttctttagcttttccatctacaactgtaacgtctcctcttattattcctgctggagcttccataactacatgagttacaggctctactgctggaactacacctgtttctatagctgctgtcatagctcctattgtaccatggccacacatgttaaggtatccaccaccatccatgaagattattccaaagtcagcatctgggcaacaaggttgagtcattacagaaccaaacatatcattatgtcctcttggctctaacattatagcagttcttaaataatctagattttcctctaaatattcttttttctcaggcatagaatttccttttatgttaggtattccacctacaactattctagttgcttcacctgctgtatgagagtctatagcttgtatacttctgctaaatttcatatcaaattcccccttaggtttattttgcgtctttacgcatttttaattttaggaaagccaatgcttttttaacatcaacttcatccatgtgattgtctccaactacttctgtttctatgtagcctgttgtctttttataatcaattatggtagctttatccaaatatggattggtaattactaatccatctgctcccataatagtaagacctactgcaggtatatctgattttacaaactctgctatagcatttgtaaaatcaatgtgctggtttcctgccatatctaaagttataatcactccatcaggtcgcaatgattcaatccatcttccaagtctagttgctaaaaatgttttccattcattgtgctctgatgtcccaactacaaccactcctaacaagtctatgtcagaatcattatctatcaaatctagtaacgggtctctaaatatatgaagtgatgtgtttttcattgatgtagaaattcccacaaaactcattcccttacttaaattttttatccatgttttctcattttaagttttaaaaatgctaaagcttttttagcatctatttcatttgtgttgttttctccaactacttctgtctcaataccttcctttgatttgttcatatcaactatggtatccatatattgattgcttacaacaaacttagcttgagtcccattaaatgtaactccaactacaggtatatctctttttcctatttcctcaaatgtgttagcgtagtcaacatgtgagtttccccaaccatctgatgaaactatagctccatctactctcatggcttccagccaagcggccgttctttgtcccacaaaggttttattttcatttccatctggagttcctactactattactccaagtaaatctacatccttatcactttcaactatgtctaaaagtgggtctctaaagtgatgaagagatgtttcttttgttgaaggtcctattcccataatatccacctctcttaagtcatagctctaagggcaccatctctgtattcattaggagatataatcataggtacatttcccatatctataattgatgttcctccttcaaatccactaggttcctttgagaataactgattgtcatacatagcaccttgacctgctatttgttttactatgacaaccttttttgcatttggtcgaattttgtcaaaatattcacgaacttgagtagcatttcttccgtcttccattttcaaagacgctcttatttcttgtataaaatcatcacatgctctgaatgctgcaagtggaagtgttctttcaaaaggtaaacctccctttaaagttacatctacatggattatataatcttcaactgatggagttccatatctcccaaataccatttggtctttcaaaattccttctgaagaaccaaattcatgcatttgatttccatcttcatctgcaccagttaacattacatatacacccgttaaagtatgtgtgataccctctcccagtctgcctaaaacttttgttgatattggtataatgtccataatagtattaatttctctatcataatctccaggttttataatgtctacttttatgtctgttattaactcttctctttcttttatttcatctatacttgataaatctattgtaagtacatctttctttatagaagtttttgaaccgaaattaacttcattcatatgaaacggttttataacaagtcttctcattattttttcttccataatatccacctttgttcttaaaacccctctcctaaccgtgtaggagaagggttctatattttcaaatataaattacattttaaacgtgagctttatattcgtatggtaatggaactatcttaccagcagatggtattgcaactaattgctctaatgtatctcttaatatatgtgtttgcatttctatattatgtggttcaccagcattagcacccattggaactaatggagcaactgctctaggagttccgttttgtctaactactggaggaagagctgctattattattgtaggtattccagcttcctctattgctctctgcacgatcacggcagttctatggcaagtacctcagccagctgtcataactacaccgtctactccctcttccttaagtttagcagcgatagcaggaccagtttcttcagtgaagacatgttggtttcctccaccacccatgaatgcatagtgcataggagctactcctttgataaatccttctgcagctaattcatgtaatctatctatagggaacatacagtttatatctttgtttacatctccattgtcatatccaccatgtgataccatcatttcatcaactgtagctgtattaggtatagctctaaatgtagtatctcctgctagattaaatctcttgtcagattttaaatgaacaccagctgctgtagctaaagctatagtcatatcttttaattctttagttacaggagtccaaactggaggaggtgttattggaacgaatatttcagattgaagtccttgtactgttgtaaggctcatatatttcctctcccttctattttcaaacgattatttattatttttcttcttgttttgattgcatttctgcttgtttttctttttctctcctaatattttctacatactcttgattaggctctggacttaatacctcaggatagcttagcatgaatccaacttcttgacctatcttaagttcgtagtcagttataagcattctattaggtattttaaattgtccaagtctaccttttaggtctatagtcactccaccacctttgatgtcaactataataccttcataaaaagtctctgatgagatatattttaacctatccattataattctacctctctatactgttttaaacttggatctaaatttatgttattgtctaaatcttagttagtatctaaattttagttttcgtctttttcgtatatttctcttctcttcttactcattggtagagattgctcattctcttctaatactattttttctcctgtaactttttctatagcttctatgttatttaatttaacatttggattccattttctttcaggagctttaacttctacaccttctatagcatttttaagcatagccattattctaacagcatcttctggagctaaagtgttgttagataatatttcattctctataccttgcttagacttattgttgtctaccatgtgagtcatgtatttattaccaacaactagagcaccttgaacagctgagaaacttacaccaactactggtatacctctcatacctatttgctctatgtgagatgcgaaatctatatggttgtttccgaaaccttcagtagttactacagctccatcaacttccatagcttcaactaacatacctaatctcttagatacatagaatttctcagcatttacttgtggagaaccaacaaatacaacacctactaaatctatttcttcgtcttccatagctcttattactaatggctctctccagtaatgtcttgacatttcttttgatgcaggtcctatacaagttaatgcatggataccaccatctaatacttcaagtggagataatacaactggcatgtttcctaagtcaacgtttggttgagctcctaatgtaccaactggctcaactggtaatattaggttatcatgcattgcaccttgtcccattatttcttttataacaacaactttctttttaccttctcttctgtattgctctattacttcttcatcaactactaaagagttgtcaactttctttaatgcttctcttatttcttgagttacatagtcaaatgcacggtgagcagctaaaggtcctggtctttccatgttagttcctgcttttattgttacttgacctttgatgaatatttcacctttgtcagcagcacctggtctaccccacattatagtagtatttaactcaccttctgaagaaccaaattcacctatttgaactccatcttcatctgtaccagttaataccattacagctccatctataactctagttatacctgaacctaattcgccttcttctttagtagcgattggttgtatatctaatacagcttcactgtaagtttcatatttatcaggagttattatttctaacttcatatctacaactaactcttgagtttcattagcttctttacatatttcttctgcgtttctgatgtataaagtagttccttctattttagtttcatcagcaaattcaactttatctattttaaagtgttttttagttaagcttcttaaaagtttcttttcttcaacttttggagctacttctgctgctgcacttgccactggagcagcaacgtttgctactggagcagcaactcctgcttgaccagctactgataaaggtatctctaagcttatgttcttaccttcacctatgtgtattttaactgtttcacctgcaactcctgtgcttactggaactactgctgcttctgatactggagctgcttcttctactgtttcttctactacttcttctttagcctctcctgctttgtatccttctacgttatctgtagtcattggagaaagtgcatctaaagtttcttttaacttagctcctagtacttgacctatagttaatccattttctggtattgttaataatccagaatcctctaagtctgcaaatattgctggatcttctaagttttctggcgctataattgttcccgcttcaaatctacaacaacaaactgctgggtcatttgcatgggcttgagctgtttctaaagttattgacatagtataaaatacctccttacattattttcttatttattattttaaatctcaattcctcaacaggtaaccccttaactgagaaattaagtaaattaaaacctacataatttgttatgattaatattatttttttctcactcaaagtcactttatattataagcaattcctatgccaacttattaacaaaaagattttttctataatagattcttcatctatcgctatttttagccaaatattatataaatatttatttaaaatatgttattttttgtatttgtaaacattttctcaaacaaaaaaagtgtcaattaatcaacactttttcattttttttaacacatctatatacacaacacttatacaagtgttggctttactaggttttaaattaaagtttatcattttgtcaaaatttagtcatatgtcatattttagacacatctattttgtattggtctatcttataatacaaagttgttctgggtatatttaatatcttagctgctttagctttatttccattagacattttaagtgccttggttatattctttatttcaattttttgagttgccttcgttaaatctaagggatactcttcttcttcagtactattatttgtagaatccatcatataacttggtacatcatctacatctattttagaattttgtgacaatacaacaatattttcaatcgtattttttaattctctaatattacctttccatctataattctgaaatatatctattacatctttgctaattgtaagaacaggcttattattttgtttacatatctcctctaaaaagctatgaaccaataatcctatgtcttcttttctctctctaagtggaggaatctttatttcaacaacatttaatctatagtataaatcttctctaaatttttctgcctttaccattttactcaaatctttattggtagctgatattattctaggatttatttttattgtggtatctccaccaactcttcttatttctttttcctgtaatactctaagcaactttgcttgcatactaagaggtaaatcggcaatttcatctaaaaatacagttccatcttttgcaagttcaaatatacctattcgaccctttttacttgctcctgtaaatgcacctgattcatacccaaaaaactcactttcaaataactcatttggtatggcactacagttaacaggtataaattgaccttttctctcactataatcatgaatagctcttgcaaatacttctttacccgtaccactttcaccccaaataaatatgctactatttgttctagccacttgttttgcaatcgctttcgatttttccaatttataacttttacctaaaatcttatcaaaactacctttagataaatttttgacttcgttctttagatattttaatgtatcatttactttttcaagttcaagagctaatatcttagcttctgtaacatcaacttctgtacatacaacaccgataaattcttctttataaaatataggatttgcatgaactaatgcatacatattttcttttttatctgtaaaatacaagtcactcattccaactttactatttagtactttttctgaaatagtattttccaaaaattcattcatcggtcgaccaactatatcttcagactttatatcatacctttcctccataaacttattccacaagataacaacaccttcgttatttatagcacaaattccttctttaatttgacctataatatacttcaaagtcaatccataatcttctaaatgcatatatagatagtccctaatgtgctcttgttttagaactccaataattttattatctctaagaacaggaagaatccctatattttttaatatcattatatctctacattcatctaaggttaaaccttcgttgacatatattacatccttcttcattataagttttactggttgaccttcatactttttatgcatctcataaagattatgtatatccgtcatggatataatgccttttaattggtcagatgaatctattaccattagagtttttgtgttgctttttatcatttcttttattgcatcttcaattcttgtgtcttcgtctatagttgtaaattttgtatccattacctcttctactttttttacttctggtatcgaaaacataaagtccccccctttatagtagtacctcatcaaaacttatttatatatatttattctagcatattataataattatttattaaataattattattaaaatttattaagtaattagcatttaaatttatataatcactttaaaatttataattaaatttatacaaatgaaatcaaatgaattatacccttagtatattattttttcaatactattttcaccttcaaaacatttttctattcatcaaacaattaatgaatgcctgtatccaatcataaatttaagaatataattaaaatagatatttttaaacaaactatatttgcatattatatttacataaaaaagtcccaaaatgacttataaatcaatttgagactttttattttaaacttaataataatataaattaatttctttttataaattaaggcgtaaaaccactatacctttaggttggtggatgtaaacctatcccttactttgtatgtatttttcaatcatttctttagaaacatttcctacactgaaagcaaagtatccatctgagcaaaaagttttttctgtatttacatacaaatatcaaatgtaccaataacaaacacttagaatggtttctactaacataattcacaactccaattcaatcccttcttaaatatatatggtttaattagttttacatttggcacttttttgatttcttttaaagctatatattgccctcaaaatacattaaaaaacatccttagaagtaatttttaagttttacttctaaagatgtctaacttctatttatctattattttatttttaatcttacgtcaccttttattcttcttattaatgggtgattaactgttctcattacatggtcagtaatatgatatacacctaactttaattttggtgcagaacccattactgtgttactacagtcagtacagtttcctattaatataacttctgctccagctttcttaaattcaatacatttttgagcttgtcctggacagtgtcctggattttcacattttaatgcacctttaatttcttgagcttgtttacatttttgaactgatactatatcagtaactcccattttagttgctatatctctcattctctcttcattaggtccacatgcacagactaaaagacccatttttctcttttcattaacaaatggcatagtaactattataccaccactagttttagttattggagcatctaaagtagtagctttaccagtgaaaggtcctcctaggattatttcaccatattcaccttttattccaccagctctttcaattaattctccgacagttgttccaattggcacatcttcaaatactatagactcttttccactgtttaattgaccaactacagttatatttttagatataactggtcttttttgctcaacagcctctactattctagttagtgtttctacgtttattactactgcattagcctctgaaggtaattgagttggctcaagtaattttcctagaacgtctcttactattgctctctcttctcccattgggtacatatcaactagttctgcaacttctatgttgtctcctggctttattacttttttgaaagcttctattgcttttggatgcttgctttttattgctagcataccttttccagcattagtaacttccatagcatattttataccttgataaactatttctggtctttcttctatttcttttatattatgagctaataaaggttcacattcagctgcatttgctaatattgttccaccatttaaatctatgtttaattttacatgagtagggaatcctgctccacccattcctactactccagcttctttaattaagtcaagtataccttctccttttaatggttcaaaagtatcttcttgtacttcatcagcttcaattactatcgcttggtcatttatttcacttatttttccactaacactggcataaatatttgcccctaatccagttggttctgcgattagagttcctttttttactacatctccaacacttactactggcttatctggaccaccaacgtgttgttttaataaaatagaatatagtttgttcaactagtacgcccccttaagtatattaatttttttataagctgttcaaataatgttaatgctatttttctattataaggtcttaacatattgtttatttctatagaacatatcgcttattaacaaagcaatttctatgccaacttttaaacaaacttataccctttggaaatactgtcttacagcattcattaattcttctaaatttttaaatccatcaaaaaaaagtcaattattagacacttttttaatcaatttaatctataattattgatattgcatacatgtataaaaagtgtcaaaaaatagacaccgtctttttatcgacacttttctaacatatactatataatttatcacaactttacttaaaatatacatttattacttattaattcttagttttttgcactccattggaatcaactacataattatctttatacaacaaatcagatattttgactagactgtatccatctttttttagtcgacttattatagtatccaaatagttatctacatcatttatattagcatggaataaaactattgaaccaggttgagattcttttattactttctcaattacatgatttggtccaagctccttccaatctatagaatctacatcccacttaattactttataacctaaatcactacaaatgtccatagctttattgtttacgtccccaaaaggaggtctaaataaattagtcttttttcctgttatattatatattttttctgatgtagtttctatctcttttgttatgtcttcttttgatatttccttcaaattggcatgagtgtttgaatgatttccaatttcatgtcctttttcatctatagcttttacaatttcttcattatcatccacccaactaccaactaaaaagaaggtagcttttacattatgtttatctaaaatttttaaaatatcatccatattatcagttccccatgctacatcaaaactcaaggctatttttttctcatttgtatcaactttatatataggcatttttgaattgtcgtatttagaacatatgtattttattccataaacaaaaacaaatattaacactaataataatgaaaaaaataaaacactatatatcaaagctttagtccttttaacttctcttttcatactattccccctttgaaataatttcttctatatttaaaatttattttttttcagctcaaaaaagtactgtaatatttaatttataagacaataactaaaaaaataaaacctatattgacctaattaaactctctaaaatactcatttatttaatttttttatattttttacatttttacctttatttttctgtatatattatttttattttggagaaattagtattaacatcacataaataaaagtgttgttagacatcataaactaattatttgaggaggaaatttactatgtcaaattcaaacagaacagtagttccagaagcaaaagctgctttaaaccaaatgaaattagaaatagctaacgaaataggtttatctaactatgaaaacatagataaaggtaacttaacagctagagaaaatggatatgttggtggatatatgactaagaaattagttgaaatggctgaaagacaaatggctggaaaataaatagtaaattttgacacctgggtatcaacagggctgctaattagcagccctgtttctctatatttatttataaaattgttttatatgaattattaaagattaataatacaatacaaattgttcttttaattttgtacaaattagtttaatatattatatatagaaatagtttgacggaggatgatatttatgtttgaaaactcgtctgaagaattagcctatcacaaacttttaattttatatatattagaaaaaattaaaatggatttaactaattctcaaataactcaagtagtattagagactgagatgatgaattatttttcattacaacagcttttatctcagcttatggaatctaagtttttgactacatataaagactctgacagagaatattatgctcttactcaaagaggcgtagaaagtctagaatacttctttaatcgaatacctactagtgttactgaaaaaatagacaagtatatagattctaacaaagaaaatctactagcagatactcaagtaaagtctagttttgtaaaacaaagtgataatgaatttattgtcaaccttagagtcatagaaaatcagtctaacttaatagatttaaatctaaatgtttcatcagagaaacaagcaaaacttatttgcaataactggaaaaataatgcatcttatatgtatgccgaagttatcgatttacttataagagacatacattaaagcctacaaacaaattatagttgtaggctcttttcctaccttgatttcttttattaatttattgtttgcagtttcataaacttttactgaattttcttgtgtatctgatacaaatagtagcttttcatctttagatatttctaagccttgaggaatcccatttatttcaatatttccaatgtatctactcgttgtataatctaaaattcttacattattataacccaaatcagcaacataaacttttttgccactataattaaatcttatttctactggtaataaaaattcatataataccttttttatatccatgcttacttcatctattattataagctttccatcaagtgttgatatatacatttctttcttttgtttatcaagctctatatgccaagctctaaagtccatatttattttcttttgtatatttttattaattgtatctatacatactatcgagtttatacacggtacatataattttttactttctctatcaaagtcaaatccatgtggcatattatcaactccaataattcctattggatttaatgtgtttttatctagtacatatatactattagaatcttcatttgccacaaacaattcattatcactaagtacaacttgactaagacttcctcctatagagacagtatcaattattttatcattacttaaatctaagacataaagtatcccattacttgaactaggtatgtatattaaatttttttctttttctatgcaaaaatggtgtggatatatattatcttctaatactatttctttttctagttcaagtgtagaataatcaactatgctaatactctttgataagtagttagaaatatagattttcatataacccctcctctctacaatacatatactacaataatatattatttcattagcttgtattatgctttatagttgcattattacgcatatatttggtattattattattgttaaaaaaagaaataatatttaatggaggtctttttaatgaaagtaacatttaatccaagtggtgtatgttgtagagaaatgatttttgaagttgatgaaaataatgtgattgttgatgctgagtttataggaggatgtaatggtaatttatcaggacttagaagcttaataatcggccaaaatgctcttgaagttgctgataaattaaacggtattgactgtggtggaaaaggtacttcttgcccagaccaattatctaaggctatacgtcaatctatataattacttatataaacatcagtaaaattattaaaaacttactttatataaaaagagttgtccattttttagacaactcttttttatatctttatttgtatatttattttataaaattataatttctttactaaagttctcactgtaccaatcatatataatgaacctgcacttattataatatcatcctcacttgatgtttctaatgtataatttactgcatcctctatctcatgctttgatgttacatcatctacatattttaatactttttctcttaatatatctgaatttatggcccttgggttatttggtgttgttgttattaccttattaaaatgtggcaacaatatctctaaaacactatcaatatctttatcttctaacatacctattaataaggttaattttctacctttaaaattcttatcaagtgcttttgccaaagattttgctccatcttcattatgtgcaccatctattataaaaattggattttcttttatcttttctattcttcctggccatttagtatttataagtccttttcttatagattcttcatttatatttgctaatttatttatgtcttttagatattttattacactaattgccaagatagaattgtttatttgatgttcacctatcaattttatttcaaggtctctataagtttctttcattacagtacaatcgtatatttgagaatttatatctgatttttttatgtttatatcatcaaaatcaacttctatatatttagcttttttctctttacaaactgactttataacatccttcgcttcatcagtctggtcatatactagtactactccattttcctttattattccagccttttcgtacgctattttttctattgtatctccaagtatacctgtatggtccaaacttatagatactatcacacttacaagtgattttgttattatatttgtagcatcatatctgccacctaaaccaacttctaatgccacaaagtctaccttttgttctgaatagtaataaaatgccattgcagtaaccacttcaaattctgttggatatgcatagccttcttttaccataatctctattttttcttttattaactcaattattctagcaacatcatcctgtggtatattttgtccatttactcttatacgctcagtaaaagtttctaaatatggagatgtatataaaccaactttatatccacactctcttagtatattagaaacaaaagaacacacagaaccttttccattagttccagctacatgtattatattcaaagtttcttgtggatttcctaataattctaataactttccgatattttctaatcctaatcttataccgaatttattagtttgtgatatgtactctaatgcttcttcatatttcattatctaactccccctgtattggcattttctcttatgctatctaattatagtatattttttacttttaatctaccgacaaagaatacatataatttaataccttctacattaaatttagctacaaatctttatttataagtttttatatctttccactaattcagtcagtgtatatattgaaactaagtcatattttgagatgtccatataattaaactttatgtcaaatctatgctctagctttttcaacagattaaaacaattatcataaaccaaacctatctccttattaaaaaggctacccttaaagagtttttcattattatcttcaatatctaaacaatccctaacaacgtcagcaactttcataagaagagcattttctttgtcatacaaatccaatttaaagtttacaattctactacactcatcaaaatcacaactatcccaatgatttctagttgctaatgattcaagcttatcatttaaatcagatattgttatgcctggtttttctgataatatcttagctattttaccagtaagctttgctgataaataactattacattttggtggtaatctataggaattatttatatcacaacttatatatgaattgctatccataacacattgaacatcatattttttgttgtaccaaaatgaatcatctccatctaaagtaaatcctcttacacctataacattgttaaacatagctggataacttaaatcaaaatcattagcgagtgaacatactattatttttccttttctaaacaattcgtaacaaacttcaaataagcccttaacactctctactcctatgactgataaacttaaattaattaatcttatgttagtgtctaaaaggtatcttaatgcttcttcaagaacttttatatttgtaataccatcttttctcaaaatttttattacaaataactctacatcttcatactctttctttattattgatgcacaagcagttccatgaccatcttcatcatcaaatttatctgatataaagatataatcatgcatacattcaaaagcaattcctccaactaaattatcttttaagtaatcatgttctttgtctattcctgtatctaatactgcaaccttaactttattattcatatcacatatattctccattacaaaagtttttaatatatctatgttaatagttcatcttaaactttgatttaagttgcacaatttatcttttaaatgctatatttcttgctaaaaacataaaataagtacaccatatatttaatttatatttattatatcaattattatcattaaatggttaaatgttaagataaaatttttagatttatatcacaatttaggattatttgtaaaaaaggagattatctttttattagacaatccccttgtatattttattaatatttatctatgattaagcatcaattttattttatactttttgattttaatactatatatctaaatcttatttagggggaacaattatttatatgatataaaaatgctaatttgaatgaacttgtcttataatcagttttataaaatacaccattctacaaagtatgaatcaaaaggtgaaaaaatactaaaaataataaatcaacatcaattttaaccaatatatgaaaaacttataccaagtatgcataaaaactaatataaatattattttaacaactaatacttacacctttatatattatatcatatttcaataaataaattgcataaaaggaaatcttttcatagaattaaaccatttattaattcattactataggttcaataaactataagatgtcgctttaatatttatattatactccattaaatattaatataattaattaaagtatgcatagctaaatgaaacaaatatctatagagttttataaatagtcattattttaaaaaggtaatcatattctaaaaatacatataatgcatataaaaatcaataatagtatattaataatcaggctactaattaataatcatgctactgtaatggaaactctacatatacatattaaacaatattaaaagtctataaactgatattttgcataataaaactgtcttaatataaataacattttatatattaagacagttttaatcaatagccctgtgatgacattaaatcttttttacgatattttcaattacctttttaaaattaatacattatatcacataacaagcttgttaatgctacttttaaatctttaagtctatacttacttataggtataaattgttcattaatagtaatcatattatccctaagatcttctattcttcttaaattaacaataaaacttgtatgacatctaaaaaagccattttcacacagtaatttttctgcttgtttcatgctcatattagctttataatctctacctattgtatgtacaactaaatctctctttacagtttcaacatataaaatagaatctatcagtattctattaaatccttttttactatttaaaactatataacgctccttctttctttgaaggttatcaatacaaagatttacacccattgcaaagttactatactctataggctttactaaatatctataagcacgaacctcataaccttggggggcatactctgaaaaagctgttgtaaatataatttctactttttcatcaaactttcttatttttttagccacctcaattccattgatatctttcatttggatatctaaaaatataatatcaattttttctgggtatttggatattaaatcttctccacaggaaaattccagtatttgataatttagacatctttcagacaaaagtttttttgtaaactcttttagtatgcttctttgtattttttcgtcatcacatataactaccctgaacataatatcacctccaaatctaaaatatcatttagtttactttatttcaatttccaaactgtactcactagctttcaaatttaaatttctttataaatttaagttgtcgattaaactacttatagaaattctctttaatatttaaacttaaattacgataaattcctatacttttctagatatattatgtaaaaaaatatagtaaaataaatataatatgtatttattaccctatattaaacatcataatatatcaaatttttattgcttataaattttaagacataaaattcatatattcacaacataaaataaaaatataacacatctgtaaagaattataacatcatatttgtatatatataaagaaaaacatacaaaaagtatagaatatatactttttgtatgtttttactaattcttatatttattttattttagattctaaatttgttaatctttcctcaacagatttaatcatctcttcaaatttttctttttttactttttcttcttcaattaaactttcaggagcttttgctaagaaaccttgatttgcaagctttccattaactctctttatttcgccttctaactttttcttttctttagacaatctctcaatttctttttcaaaatcaactaattcattaagaggtataaatatttcaacaccatcaataactactccaactgcatcttctggaacattagatttatcttttgctatctctacatttgaagcagatgctagagttataaaatagtctttaccaagctcaatagcttctattttttcttcacttgggattattatcaatttagctttcttagaaggtggtacattcatttctgctctcacatttcttatacttcttataccttccatcaataagttcatcatatcttcttcttcagccatgttatcttcttcattatattttggccattcagatactattatacatccttcaacagtaggaagatgagtatatatttcctctgttataaatggcatgtatggatgtaataattttaatattttttcaagaacataagttaatgtatataatgctgcagatttagcatttgcatcttccccatataatctaggtttaaccatttcaatataccagtcacagtattctgaccaagtaaaatcgtatatcttttgaagtgctattcctaaatcaaacttatccatgttattagttgcttcttttacaatattatttgctcttgatattatccatttatcagctagagttaagtcctctttaacactttctctagtcatgtttttaattatatcttcatcaatattcataaatacaaatcttgatgcattccacaacttatttgcaaagtttctagcaaattctactctttccatatagaatctcatatcatttcctggggaatttccagttgttaatgtaaatcttagggcatcagctccatattgctcgattatctccaatgggtctataccatttcctaaagatttactcatttttctaccttgagaatctcttactaatccatgaaccaaaacatggtcaaatggcttttcattcatacagaacatacctgcaaatgccattctaactacccagaagaatattatatcgtatcctgtaacaagtacacttgttggataataataatctaaagcttcagtcttatttggccatcctagagtagagaaaggccataatgcagaactgaaccaagtatctaaggcatcttcatcttgtttaaaatgagtgcttccacatttaggacacttatctggcatttttctagcaactactatttctccacactcttgacaataataagctggtatttgatgaccccaccataattgtcttgatatacaccaatctcttatattttctagccattgtaaataagttttatcaaatttatctggaacaaattctaattctccttttttaagaatatctatagctggttttgcaagttcttccatcttaacaaaccattgctctgataatctaggctcaactactgtatggcatctataacaagttcctacattatgattatgcgcttttatcttaattaggtaaccttgttcttttaagtctgctacgatagcttttctacactcaaatctatccataccttcatattttccacaaacttcattcatagttccatcttcattcatagtatttaactgctcaagattatgtcttaatcctacttcaaaatcattagggtcatgtgctggagtcatcttaactgcaccagttccaaactctaaatcaacataactatctgcaactattggaagttctcttcctactaatggaagtattgctgtttttcctattaaatgtttatatctatcatcttctggatttactgctataccagtatctcctatcattgtctcaggtctagttgtagctatttctaaaaagtcttcactatcttttagtgggtactttatatgataaaagtttccgtcgtgttcttcatgttcaacttctgcatctgataaagtagttttgcaatctgggcaccagtttattattctatttcctctgtatatgtgacctttttcatataggcttacaaaaaattctataactgcttcattacacccttcatccatagtaaatctttctttatcccaatcacaagaatcacctagttgtttaagctgattagatatttttcctccaaattcatctttccattcccaggctctctttaaaaattcttctctacctatttcatactttgtcttgccttcttgtttttttattctttcaacaactttaacttctgttgctatagaagcatggtcagttcctggaagccaaaaagcttcatatccatccatacgtttccatctgattaatatatcttgaagtgtatggtcaagagcgtgtcccatatgcaattgccctgttatatttggtggtggcatcattattgtaaatggttttttatctggatttggtttagatttaaaatacccttcatccatccattttttatatagcctagcctcaaaatcttttgggttataagtttttgataaattcgtattttccattgtcctgcctcctgtattttataaataaattttttaaatatctttagaaataaaaaagagctcttcatcctctttaaaaaggacgaaaagctcgcgttaccaccttaattccaaagcttaaaatacattaacatataattaaattattagttaatgttattttatcaactttgactctcaaagaatttaacggttctaaccgtctaaacttacttatagttcagtttagaaactccaaagctacattcagtaaatcttatacttagaaaatcttacagccagtgaattttcctctcttttagtagtatttacttactcctcttcttctcagtctttaatattacatattattatatacaaatattattctctttgtcaattatttttattttattttttctgaattttcttaattatgtctattctcttttatatagttgttatattttaaaatatgtttttacagttattctgtcttataatgtcaataattgcaagattattttattttaattttaatgctttctcattaattttatattatattatccttacagtatacctcttattcgtattttttatattatatgttttattttataaataatttactttatcttttactatatttaaatttattataagttttcttgccagaaatttttaggtgttatattttctgtaattggcaatattgtatatcctctctcttttaagattcttataatattatttaaagcatttaaactttgctctttctcatgaattaatactactaattcatctctttttcttccataatataatatattacttactatctgacttgtagaagacttccaatcctgtgtatccaaattccagtcccaaattaaataatcatttgccataagtttattatatgaaccttctggcatatatggtttacttccgtatggtaatcttattaattttgaactctgaccagttatttcttgtagagtattattgcatgtattaaattccccaactgttacttctgggcttttatataacttatgtatatcatgacttacactatgaaaacctattgagttttcctcttccaagactctccttacttcttccttgtgatttttcatattttgattaagcataaaaaatgtcgctttgacatcattttcttttaaaatatcaagtagtgcatttgtatattttgatggaccatcatctattgttatgtatgctactttttcagaagtagcccctggaccttttgtttcttcttgagatgctttgtatatgatttctcctaaagtattactttgagaaagcagttccagtgtattttcaccttttgaacttatattttcaactggaacattattaattttttcctccaataatgttccagttaaaattaaaacagctataagaaatatccttataaatacatgaaaaacagccttattatctttaattttcatcccccatatctcccttttataaaagcataagtttaagacttaaaaagttattttttatatttattctctttcttattactttttatatctctactaaatatttttttaaccttttcttcttctttttctcctaaagattctactcttttgattcccaaagaagttaaaaattgtaatacatttaaattatcaaatggagtttccatattcgtactttcactatattcatcaacattcttagtaccttcttccacacttaaaatacgcttcggacctcctacacagcctcctacacaccccattccttctataaatgtagcttctatttctttatttagaactttctttagaccgtccatgcactcttttgttccttcaaatgccttttcttcaaattttatatttttgtcaattcttctgactgataacttaactgctttacttacacctcctgttctagcataaactctacctgaaagggacgcctctactctattactctcatccattattgctggatttaactctaatgcatcaaatatttcttgcaactctttaaatgtaagcacaaaatcaactgcatcttttatatcttctaacattgcttctttcttttttgccatacaaggacctatgaatacaactttagcatctggatttaaaatttttacagctctcccacaagcaatcataggagaaacggatggtgatacattctccaatatctgaggaaaactattttgtatcaaactaacccaaataggacagcaacaactagttataaagcatccttcttcgtcctttttcatatgctcataataatcatatgcttcttttgcagtaagcatatctgctgccaaagcaacttctatcatatcttcaaatcctatcttttttaatgcagttcttaatttaccagggcttacatctttcccaaactgtcctacaaaagctggtgcaactattgcatatacagggctctttatatcttttaacaattttatcattggtataaattctattttatctgaaattgcacccaacttacatcttgatacacaatcaccacaagcactacatacatcttcctcattacaattaatatgcttacttcttatcttacatgactcatcttccttattattttcatcacaatatttgcaagcatctgatattacagatattattggtcttttgacttcatctaaatttacagcttcatgtagtgactcttttaaatttttatctgtatcttctgtcacatccaatcccatagttaccctaattaaatttaccatagtatctttatcaaattttccactaaaataattatttaaattatcctttaaatcttcatttaaaattttattaggtaagttttcaatatcctctatatcatcattccacactgcttttacaagttcgccaaaaagcttcattttatatatttctagtattttagaattgtcatttctagtattcataaaaaatagtacctccataaattaaacttatatatgtttaatatttacaaagatactattttttatttattatttaactactattattaatatgatttatttagctttctcaacaactctatttcaatcattattttcattagatgatagttgaatacggggcttttttcttcatctatattccagtctagcttatccacattatatgttttcttaaggtatttatatgtatgctctttcaaataaagtttattttcaagtaactctatagactgcatatgaaaatgtatttctctacatatccttaaggcattctcaattttttctatattagtttcactcaaactataatccaactcatcaataagttttgaatatatttcttctaatttttctacttcttcttcaaatttctctacatttaaattttcttttctaagaattttatcttcaataagtaacattgaaagttcttctatctttttaaattcatctataacactatttagataatttggtctagccacataataattaacaagtactccaaacaaaacacctacagatgtatctaacactctatgtaaagaataatacacagggtcactatttcctacacctagatgtatagccagaaaggttacacaggcaactactactgactttattttaaacagattgcataaatatattgagcacattactcctagaccacataaaaaagggtctccagctttaatgatggcaaatatgaatcctattataccacctaaaatagtaccttccactctattgattcctgtctttaaagaaccttttaccgtatcttgaacagaaattatacatgctactagagaataaaacatattctctactagatagttaccaagaatcatacataaagtgacactaattcctgtttttatagtcctcatacccatcttttgaagtttcaaagttccacctcctaaaaagcaccttatataaaatacgcatcctcatatttaatatgttcctagtatatcacaattttttaaatttacccattaatcatatttttttatcaattctttcttaatttagacaataaaaaaactgctttaaagcagttttttatcctatctcaaccattttaccctcaattgcaaaaattatcttctcacatacatttgttatatggtctccaattctttcaaggtatcttcctataagtagaagttttactccttggtctatagtatttgaattttcatgcattatttttaaacaatcaatttgtacttgttcatacaatccatctacaatatcatctttagttccaacatcataagctatacttgcatcaaataagattaaagcttctctagtctgagacatcatagacttacattcttttgccatcttaggaatatctatcagctcttttatataagcctctccacctatcttcaacatttctctagctatatttgctgcataatctcctattctttccaactctatcgatatattacctaatgaataaataaatcttaagtcccttgccattggttgctttaatactattagctctatactcttatctcttatttcttctcttaatttatttatttcttcatcatcttctactacttttcttgcaccctctaaatccttctctatcatacaagtcacagacttttctattgcttcttcacatttttccatcataagtactgtttgttcttttaaagtatcaatacttatatctaaactattattgaccattgtctaactcctttatagttatatattttaaccaaatctacctgttatatagtcttctgttcttttatctacaggagtggtaaacatagtttttgtatcgctaaattctataacctctccatttaagaaaaaagctgtttcatctgatatacgagcagcttgttgcatattatgtgtaactatgactattgtgtagtctttttttaaatcctctataagttcctctacttttaatgttgaaattgggtctaaagcagatgtaggttcatccataagaataacttctggtctcatagcaattgctcttgctatacatatacgctgttgttgaccaccagaaagtcctagtgcagatgatttaagcctgtctttaacctcatcccaaatagctgcaccttttaagctttcttctacaattttatctaattgcttcttatctcttagtccatgtgtacgaggaccatatgccacattatcatatatactcataggaaatggatttggtttttgaaataccattcctactttagtacgaagatttataacatcatctgaggtatatatgtcctctccatcaacagaaatgtttcctttaattgttacatcttcgattaagtcattcattctatttaacgttcttataaaagttgattttccgcatccagatggacctattaaagcagtaaccttattctcttttatatccatatttattttctttaatgcttgcttatcaccataaaataaatccaaatcttttacactcatttttatcttatcgattaattccattattcacacctcttaaatttaataattagctttatttaatttcttagcaacaaatcttgctagcatgtttagtgctaatacaattactattaaaacaattcctatactggctgctgttgctatatctccactctctttagtcagtaagtatgagtgtacagttaatgttcttgcactatcaaatattccacctggcatcttggctacagtacctgctgtaagtaatattgcagctgattctccaattatacgaccaactgataagattactccagataagattcctggtattgcacttggaagtactaccttatataaagtttgaaattttgtagctcctaatgccaatgatgattctctataagcttgaggaactgtttttaaagcttcttctgttgtacgaattattactggtaatattattattgcaactgtaagtgaacctgcaactatggaatatcccatttttaatgtaactacaaagaaaattcctccaaataatccatatactatagatggtatccctgataaactttcagttgcaaatcttatagctgtaactgcttttccttttttagcatattcttgtaaatatatagcagccaatattcctataggagttgctacaactatagaaactactactgtatataatgttgtaattatcattggaagtataccaccatcacctgatgctgaataattgctaaataagaaattaaaattcatgttgccaattccctttataaatataaatcccactataatgactaatgatactattgtaaatagtgctgatagatatactaatgacttcaatagattctctttgaactttctcatcttaatttaccgccttatttgaaagtttatttaaaactaagtttaaaattaatataaatgtaaacaatactactccagttgcaaataacatttcttgatgtgtaccaaatgcgtatcccatttcaagtgctatattagttgtaagtggtcttacactatctgttattgcagttggcataactggtgagtttcctgcaacaagtattactgccattgtttcacctaaagctcttcctactcctaatactactgcagctaatactccagatttcgcagcaggtagtacaactttgaatattgtttctatttttgatgcaccaagtgctaatgaaccttctttgtatgcttttggtactgctcttattgctgtttctgatacagatattattgttggtaacatcattactgctaatactattactattgctaacaaactttgaccttttggaagattaaatatactttgtatagttggaactatcactgcaagaccaaatacaccatataatactgaaggtatacctgctaaaagttcaactgctggtgacattatttttgctaatcttttaggtgctacttctgctataaatacagaggttaatataccaacaggtactcctatcacaagtgctccaagtgttgcaaatattgatgctactatcatagatgatattccaaatttattggcagaaggaacccaatctgcaccagttaaaaagtctataaatgaatatccttcaaatataaatggtcttaagcctttataaaatacgaatcctattatcaaaagtaaacttgcaactgctactaaagcactaagtagaaaaatattttttgctactttttcaattacgtattttgtcttattgccattattgtcatttttttctaaacctactaatctagattttactatcataataccctcccattaaaatatacttatcgattttcgttctgtattcaaaatttaattttttataattcgtcttcatcaaatttcctgtacttttattctactttttttaagttaaatctatattaggattaagttaagcaagtgtaaaattatatttacttttttaacattaattttacttttaaaactatatttgacatttactttacaatatactgttgtttctctatattaaaatagcagatatagataataatacagtttatgtataatttattacctatatctgctattaagatttgttaactaaatttaacttttatactacatatataattatcgtatcctctagtttatatcactattatttctatcaaattgttatgatacttgatgtttgcaataggtacgaatagccaaaaatataaaaataggtatttctatcactgagaaaaacagtataatgtgtggtgtccaaaaactcatacctcctaagtgtaagaaattaaatgatgtcatttgatataataaactaatcttaagaccaattccccctggtggtaataggtatccaatccaactaacacctattcccataggaattaagcaaatagaaaaagcaatcagcatagaagtaagagaatccttacattttgcagataaaaataatgttaaactaaccattgcaagtattgaaattagaccaccaatagctataagaatctgtgcttgtagtaaatttatatttactagactaatgacagaaaacaacatttgaaatgaggttttcaaacattcagtaccaaaagctaaatcagaaattgccaaatggatagaaatacatacaacaaacattactataaatatagaaaatagagctaatattttagtaaacgctagacgagtatgtccatgtttcgtacaacgaaggatgctatctgattgtgtctgatactcaccagaaaaagtaggtgcagtaattgcaacacatataattaataatataaaaatgtaaaatattatataatcgaaagcatctttagaataacctgggtatatctcaaatggagtatctacttttctataaagttcttgagctttcatttgtgcactggaagtttgtcgttcaatcttcataatatcatttaaatgagttttgcattgttcataaaaagaatctaaatcatttgtatttatttctgataattctgttgcaaatcctgtttctgaattagcaaatgcttcaggaagtctattcaacaatgggcgtattggtaaaatacttttagaataaatatctagtgggaaatcttcactacctactttaccatacttttcttctgtttttttccatatatttaaagcatgctttaatttttttggtgttacaactccactactaatttcactattattagcataaattgtttttttatatttaatagcatctaaaccactcaattcaactaccttgccattattatctaaataattgataccctcgtaagtaattggaagaaaagccatcaatgcagataaaaccaatgccaacaataataaaattaatgtacgacgtgagtgcaacactcgtttaatttccaaataaaaaatacgcatttatttcccctccttactataaactgcttctggaaataaccataaatataaatcttctagtcgtggttcaacagcaatagagttatcaatttgtgacttttctgccaagtaacgaatagatacttgattgtttttttcactacgctgattgattatacgtaaattcatttcatattttgaaatatctctatttgatataagacattcccatactttgccctctactttcttaaccagtttatcggttgttcccacatcaagaatttttccacttttcataatagcattttgagttgatatgtactcaatatcagatacaatgtgagtagatattaggacaacacgattatgagaaaattctgaaataaaattacgaaatctcactcgctcaccagggtcaagccctgctgttggttcatccattataaggattttagggtcatttaacatggcttgtgcaattcccactcgtcgtttcattccaccagataatttaataatctttttattttttacatcagataatgtaagaatttccaatagattattaatttttccttttacttctcttggtggtacatctttcaatgctgctatatattctaaataatcttttacagaaaaatcctgtgggaaaccaaattcttgtggtaaaaatcccagtaaatttctgtactcagcacccattatataaatattttttccattatacagaattttgccattggtaggtttcataatgtctgtaataattctcatcaaggtagttttacctgctccgtttgctcctagaaatccccacacacctggtgttaaggtaaggcaaacatcttctacagcaattttatccttaaatttttttgtcacatgttcaatttttaattccatatttgaaactcctctctttatctacttacctgcaaaaacaaaagtgtcttgcttagtatttattttactaaacaaagacactcataattttaatattaaatagataatttcttaagaaaatcctaatatttgatttatattttactaaatagatgtaggaagcgatatagtaaatgttgtgacttcatctttactttgaacagtaatatcaccaccatgcaaatttataatttccttagctatagaaagccctaaacctgcaccacccatatcagattttctagcttcatctaaacgattgaacttttcaaatatagcagaaagttgttcttctggaattgtctgtccataatttctaaaagcaatatctaccttgctgtctttatgaaccgctgagataataatttctgtattaggatagctgtaagcaatagcatttttcaagatattattaaacactcttgcaagtttttcagaatctgcttttattgttaaactttcatttgcttttagaatggctctatttcctttttcagacagcaatgggtaaaattcatcctttaattgaagtaacatataatataggtctactttttcgaaattaattttgatttgattagaattatatcgtgttatttcaaaaagttcattgataagtttttctaaatattgtgctttgtcaagtgcaacttcagtatacttagatttttgagaattatccatattaggtatttcttttaataagctcaaatacccaataactgaagtaagtggtgtccttatatcatgtgctagatacatcacaaggttattctttttattttcagcctctttcactgcttgttgacttaacaaaacagacatcttaatttggttcatttgttgctctatttcctttaatggcttagatagttcaaccaattcatcattttgttgataaatagtatgtgttgcattgatgatttctcttaaataattccatggttttttccaataaaaattgaaaatagtgatatatccaattataaaaaccaaaaaaaataatacatctcttctcaacttaagccatttaacaagaggatttgaaaaatttgaaaacgtataatcagccataaacattaaaaccaatactatacctgtatagatagctaacattatatataatttatactttaaatacgcctctgtatttttttctctttttataaatttatatttatctcttagtttcctataagtaaaattattaatctttttcataatactacatcccttcttgacaagaaaaataggtgtcaaatcttgtaaccaacaccccaaattgtttttatatattttgcttcatctacagtatcacctaatttttcacgaagatggcgaatatgaactgttatagtattgttacttttattgtaatattcatctttccagatagcatgaaaaagattttctgaatttaccacagagcctttatttttcaataatacatgtagaatagaaaactctgttggagtaagtgaaagagctttaccatttaaatggcattcatatgtttgggtattcaattccagacctaaaaaagaaaaaatatgtgaaagttcttcaccagattgtaaacttccactgtatttcttatatcttctaatctgtgccttcactctagcaacaagttccaaaggtcggaaaggtttagtaacataatcatctgcacctaaagttaagcctgtaatcttgtctgtttcttcatccttagctgttaacataatgattggataagtatatttttctcggattttttggcataaagaaaatccatttactcctggcaacataacatctaaaattgcaaggtcaaattcatttaaattaatgcagtttagtgcatcaagaccagaataaaatttataaacaatatagttttcatttgtaaggtagacttctattaaatcagctatatcacgttcgtcatctacaactaaaatttttccactcatagactttaaacatcctttctatatatatttatatatattatactaaatttaatttttttatatgattttttacattagaatttattaagaaattcttaatcttattatgtaactattttattatttaacatatattaaagataaaaatgaatatatatagatttagatatacaatttatctatcttttcaaatataatctataaaataatagttctgttacgcattttttcatataataaaactgactgtaatttaactggcaaagtctagaagaataggctttatcaattaaattacagtcagctattttataataatttagtttagatatcgttagcatttcacatttataacaattattaatgagattaatatatttattattctttattaaaataatatcctgctcctcttattgttataattttctgaggatttttataatctttctctattttctttcttaatccattcactgcaactaccacactatagttatcctctaagtactcattcatccatacatgttcatatatctctttagtagtcagagtcttttcaggattctctataaaaaagtttaacagcttattttctgttggagtcaattttattattttgtcttctaactttattactccactagttctattatattcctctaattttgtattattttcattattatttacatatgagttcattcttcttaaaatagcttttacttttgcatataatatttctaaatttagaggctttattaagtaatcatctccgccagaatttaaagcatttaaaatgctttgttcttcatttatataagtcatataaacaattggacaagtagttacatttctaatttttttacaaagagtccatccatcaccatcagttagaattatttctaaaaatattaaatcatatttattgctaaatatttttccaatagcttcttcacaattatatgctaaatctatacttatttctttttcctccagaaatccttttagcttctggcaattatccttgtctccatctattatcaatatcttagtttgcattataatcactcccaaatatcattattcttttatattaaataagctattattataaaaaacatagacttaattttattgtaaaaacagttccttttcctagttctgaatctacaaagatttctccgccatgctctcttataatggatttgacaatatataaccctagcccttgcccttttggctcattattatctctttctgtaaagaatctgtcaaatacctttggtatattttctggaggtataccttttccattatcagaaactttaataattgcaaatccatcttctttatccattgataaaattatctttccatcaaatggagtaaatgtcaaagcattataaattaaattctcaaatgctcttgtaagcatctctttatttatctttgcatatatttttttctccaatatgtaagtttcaaagtttacaccacatgcttgtgtatctggcaagttattttcatatatctctttaataaaatcatttagacatattttttcactaataccaatgcttttatcttgtgatgtaaattcttgcaaactacgtactctattttgtacttcatttgacttttgatttatagcataaagataggttcttgtctcttcatctacatgaatattaccaacctttatcaagtctataaatgattgtatagctgaaacaggtgcctttaaatcatgtgccacatctgccaagaattttttacgttcatttaacaatgttgtaagttcattagttctcacttcaacttcatgttcaagattccttgtaagtttttcattctcttttattattattctattcctgtttatcatcataagagaaaataaaataacaattataaatccacaatattctgtttgccaccctgtaaatataggctcaaatctattactagtaactgcatcaaataatatgctaattccaaaaacagtgtttactgaaactaaaatataagaacttatatgctcagagcatgtctttttatatattgaaaccagcgaagacattaatatatatataaatacaatatatttatatatgtctattaatttcccatatatgttgacaaagtacatatcatatggaagaagaataattggtatcactatagatatgatactcattgtaattcctaatggtaaaattaaaaatctatacactttatcttcttctattttggatatacttccatttatacaaataatacataaaactaccataaaataggacgaatcttcaaccgcatatgtaaagcttaccaaaggcagtcctaacaaatgtacaaagggataggatacatggatggcaaagaaaacacacatacatccaaaatataagtaaagtttacttttgtttgaaagaaaccatacagacaacgaaaatatagctattgcaaaagttgtgaagcaaattatactataaaaaagtaatcgataaaacatcatattacttatgtcctttgtttctcctaatgcaggcggataatacaaaccactataataatgtgaaaaattcgatacattgattataatttctgtatctttctttgcaataaaacttactactgaatttttaattttgggtctatatttttctgttcctacatctcctaatttagaaactatttctccatttatccatacttcacttgcggaaaaaatctcaggaagctctaaacttagtagcttatcctcaccttcattttttattctcatacgataagtagcattcccatatggtgactgattcccttttctcatagaaaaatctggatattgacctataaaaacatattctggttttatatcttgctctgtaaaatcattcggtttaaatattttatgattataaaactcccagtcatctatcagaaagacaagtttacctttagtgaaagtatcattatctatagttaaaattccattacttgctctaatagacttatatgtatatttattatcatatttatacagaagatttaatcctgctattgccaacagagagactatcaatacaatgagagttccttttagtatattatactttttcattgcatcaaccacatctctttcatagtagtattaaataaaacaagaactatttattaattacagtatctcacttatggtacaaacttatatccttttccccatacggtttgaatgtattgatgctccctgcttaaagaattaattttttttctcatctgtgcaatatgaacctgcactgtatgttgatctccaatatcaggcattttccaaacttggttatatatctctatcttcgaaaatacttgttctttgttttcagctagaaacaataatatttcaaattccatagtagttaaatctatactttctccatcaaaagttacttttcttgaatttacatttattactaacgctgaaaactttaacacattaggaactgatgtaatatttttgtactgcctcatacgagcatatattctaagttcaagttcttttaaactataaggttttgttatataatcatcccccccagctaaaaatccccgaactttttcttcttcatgctcataattagataaaaatattataggtatgttaaccttttcttttatatcattgcacattttatatccatctatatctggcaatgaaatatccaaaattatacagtctaaaactatacgctctactatatccatagcatctttagcagtctctgatgtatatacattaaaacctatattagaaaaataaatttgatttatatttaaaatatcaacatcatcatctacaaccagtaaattatacattacaccactccattcaaaggtattttaatcataatctcaagttttataattattacaaattataatgttttattttcatatataactagtattattattttataatatctttacaaactagactataatacttaagtatttttgaacaattcttgaatattgtattgaacattaagatttattattaaatactaattaaagtctccgattgttggagaatggagcttaaagtcattttcacttataaatttattatttttctagaaacttgtctattggctagtttgagtattgatttatatgatttatatggttataatataaaataaattgtattattttggtaaatatattgttacaaaaggtttatattttgcatctcaatgtttataaaaactttattttcttattataatagtattatactttttaaaaaatttcccttttccaacaaatggctactttaaaagccaaaatttcacctatcaataaaaatcttaacgactaatactcttattttcaaattttgcaacatttttgttaattttaaagcaaaaaaagactatgcaatataaaaattatattcatagccggttgcaccactaactccatatatctccagatgcccaataataagatatacttctcagtttctaaaatatttttattaaaaatcttttatatattttcataaatttcttttttattctaacattgtaatattattttgtcaatatttccatatttttagatataagatactaaaatacctattttatctaaagatatttatatttctacattcaataatagacaataccctgcaagttaaagcatcatttttatgagcttatctcacagggtattatatgtttactttatattataattcatgttattgattaactttaataaatcctttttctgaaacaagtgcttgtccttcatcacttaatatataatctattaaagctttccctttttctgacaaaccatcttctttattaactaatataaatggtcttgatattggatatttattagccattacatttgcatcagttgcttcaacatcatttatttttaaactatttactttctcatcaacatatccaaatgatatatatcctatagcattttcatttccttcaactgtagtttttatatttcctgaaccatcacttatttgtgcatctttagttagttcttctgaatcaaaccctacaatttcttggaatccatctctagttcctgaaccttcttctcttgatactattactattggtgcatcatttcctcctacttctttccagttagtaatctttcctgtatatatacctttaacttggtccattgtcaggttttttactgagtttgcagtattagttatcaatgctataccatctattgctattttagtttcctttaatccagcacttttttcttcatcttttaaatctcttgaactcattcctatttcagatgttccttctatggcattttttatacctccggaagaaccaatctgttgtacttctacactaacaccttgatttttttcttgaaacttttctccgatagtttccataagaggacctattgaagttgaacctgaaacagaaactttgcttgaatctcctgaatcacctgaacctcctgagttagaactacatcctactgctaaagctccaactaacattgtactagctaaaagaacgcctattttctttttaaacattttacttacccccgcttatattttaattttttgttgtcatttttctatattttaataatacagattctttgttaaatgaatattagagcagggttaagtaaatgtaaatattgttaaatacatgtaaaaacttaattttatatgatttattcttaattagattaactttttaaagttactttaggcagatataaacacaatacaactcatattatcagaagtcttcattgaagctatcaacctatcacatcctataattctttttctagtttattaactaattcagcaaatacatttaaggcttcctctatagattcttttttagtcatatctacaccagcagattttaattgttctagtgggtattctgaccctccactttttaagaagtttatatatctatctactgcagtacttccttctgaaagtatctgttgacttaaagcacttgcagcagaaaaccctgtggcatacttatatacatagaagtttgaataaaaatgaggtattctcgcccattctattcctatttgtttatctactattgcagattttccgtaatacttttcatttaatttgtagtatatattagtaaattcatcagcagtaagtggttctccactctctaccctttgatgtacaattttttcaaattcagcaaacatagtttgtctatgaactgtagttctaaattgttctaaataataatttaataagtatatagtttcatccttagacttagaattttctaataaataatttataagaagtaattcatttaatgtagatgcaacttctgcaacgaatatcttatagtccgaatataaaaatggttgacttgttcttgaataatgactgtgaacagagtgccctaattcatgaattaaagtgaatagagaattaaggtcatttttatagctcattaatatataaggatgtgaatcataacttccccaagaataagctcctccttttttaccttcattatcatatacatcaatccacccttcatcaaaagcactttttatgaccttcaagtatttttctcctaaaggtttaagtgcctctaatatgatatcctgtgctttatcatatggtatatccatgtcaaatttatctgtcaaaggaacatacaaatcatacatgtgtatttcattcaatcctaaaaatttctttttaagctcaacatatttatttagattaggaatacttttatctatagctgatataagattattgtaaacatctaaacttacatcatctgaaaataaagacgcttctattgctgaattatactttctagtttttgcgtaaaatatctctgattttattccaccataaagcgttgaggcaaatgtatttttatatttctcatatgttgaaaattcaccttcaaaagcgtcttttctaactctactattcttactttttataaataaagagtagtttgaatgagaaagcttaaccttattaccctcctcatcttctatctcaggaaattccatatctgcatatgctaacatatcgtatacattttctggaattgtcgataattctgatgtagctgcaagtatttcttcctctcgttcactcaaagtatgtggtttatctctcaatatatcctttatatattttgtataaaaggatagcttctcatcttttaagtattcacttaacttattctcttctatcgccagtatttctggaactatataagaagtagccacacctaaatcagtagataacatttctgtcttagtggctcttccttgattatcattaattctagtatcttcatgttgtttcatatgagtatatacatataaattttgaacaatcctagatgcattttcagagatatttaatactttatataagttctccttactctcagaaagcttccctttatattcttttacttcttggataagattttttactttacttatgtctttttcaatttcctctttactggagtacatcttatctatcttccatttgtacttttcttctattgtacttctatcagttcccatatcatacacctctattttaatttgttttatattttattcactttacaaaatatattgtatatattttagtccaaataatctacatttattactccttctatcatatttatttctttcataacgtcgtgtaagtgtattctcttagcataagatacaaaaaaattaaccttccagtattcttcattacgacattctatttccatatttcttacgataagttgatttttttcaaatttatcatataaaaaaggtatagagtccaaattgcttaattttaatatcaatacattcttttcttggctaaataaaaacgtattgattatcctaagcacaaataatgctatcattacaaataatccacctagaattgccaattcataataaccatatccaactgctataccaatacatgcagttgcccacatcccagcagctgtagtaagcccttttactccacctttattttttaaaattgctcctgcacctaaaaaaccaattccagataatacttgagcaggcattcttgctgggtcagcatttgtatacaaattataatcaaagaataattgaatcgaagttattgaaacaatacaagaacctattgcaattagtatatgtgtcctaaatcctgcaaactgtcttattttttctctctctaagcctattattcctcctattattagtgctaatagtaaccttattgctatctccttacttcctatatcaatcataatataaaaccctcctgacttaattacaacttatgtcctacagataatttacacatcagaaatactattttatatcttaatattattattaatatatgtaaaatatagccatctgttaatttttgatacaaaaaaacccacaactgtgggctatttgcttaggtacatgtatttatttattaatatatctattttcttacttgattctactaactcttcttgaaatatttctggatattctatgtatgtatttatctcttccctaactgcttcaatctcattttttaacgcttctaattcattgttcgccataataatcaccactattacaaatttgtatatttttatatacattttatcaaacaatattatattttgtcaatattatgtcaataaaacttactataaaaatgctttaatttaggtattgtatacctggatactaagcctacaaacataccagttactaatgatgccattaacataaatggtaagtaccctatagcaagtatattttctatgattaaacttgcaactattaattgacctatattatgccctattgcacctataatgcttatccctattagtgataaatcttttattttactcgctaaatacataaataaaagactcagataagctcctcctatactaaatagtagatatgataaagggcctgcaaatattgatgacaaaattaccctgatagtaacaattataacagtatctttgacacctaacaacattaatgaaattaaagttataatattgctcaaacccaattttgcccctggaaatataactataagaggatttggtatatatgtctctagtacatataaagctaaactataccctatcataagacctaaaaatgtcatttttctagttttcattaagttaactcctccaaattttatctatcatcttacattataatacaaaatatataaaaacacctaatttagactaaaatatttttaatctatttagaataaatattagttatttcaatgtgcaattacctctataaatcttgactttttgtatcatacttgttacaattttaatgataatgaatttcattaggaggtgttaataatgactgtttacgatttaaaaataggagaaaaaggatttattaatagtatagatggagatattaaattatctaaaagattgcttgcacttggatgtataaatagtactgaaatagaagttaaaaaggttgccccacttggagacccaattataattagatttagaggctttgaccttgcgattagaaaatctgatgctaaaaatatttctttacaataatagaggaggagctacccgtgattaatgtagcattattaggaaacccaaatgtcggtaaaactactgtttttaatctacttacaggttcaaatcaatatgtaggtaactggcctggtgttactatagaaaaaaaagaaggatttcttggaaaagagataaaggttgtcgatttacctggtatatatgcaatggatactttctcaaatgaagaaaaggtttctaaatcatatttagaaaatgaagatgttgatgtaatagtaaatgtagttgatgcttctaatttatcaagaaacctttacttaacaactcaacttatgcaatttaacaagcctatagttatattgcttaatatgttagacattgcagaatctaaaggagttaatatagatgccaaaaaattaagtgaagaacttggagtaattgttgttccaattatagcaaaaaagaaaaatggtgttgataggatagaagaagagattaagggagctacgcaaaaagcttttatatatcagaaaaactttggaagtgaaacagaaacatataaaaaattagaatccattttatcgagatgtacaaaaactacatatacacaaaagaaatctatcagtgataagatagacaatatagtcttgaatcctatattagcatatccgatatttattggtgtattgttcctcttatttaaatttacctttgactgggtcggaggaccactacaagagggatttgctagtcttatagaggcttatatttctgcacctgttagtgatatgttatctaactctagcccatggtttaaatcacttatagttgatggaataattggaggtgttggtggtactttaccattcttccctttaatatttacattattctttggtatatcgttgtttgaagatagtggatacatgtcaagaacagcatttttaatggataaagttatgagaaaggttggtctatctggtaaagcttttatacctatagttatgggtatgggatgttcttctccagctataatggcaactagaacattggaaagcgaaaaagatagaagagttacagctcttattgcaccacttatgacttgtggagcaaagctacctatatatgcactatttgtagctatattctttccacataatgctgctttagtaactacgtcactgtatttggtgggtatagttatggcaattgtagttgcattattcttaaataaaacagcctttaaaacagaggctgaaccatttatattagaattaccagaatatagaatccctactatagatgcacttattaaaaatacttggaataaatcaaaaggtttcttgataagagttgttactgtcatgtttgcaatgtcagtcgtaatttggggactttcttcattcaatgtttttggatatacagaagatataaatgtaagcttcttggctactctaggtcatattatatctcctatattcaaacctcttggttttgatgattggagaacttcagttgctattttaagtggtcttggagcaaaagaaatcgtagtaaactctttaaatatactatatggtaatctaactgttgtcttaccaacaatatttaatggagttactgcatatacattcttgatatttactgctttatatactccatgtatagctgcacttgcaactatgaaaaaagaatatggcaataaaatgatgtttacatcatttgcatatcaatttatactagcatggataatggcttttatagttaaaagcataggtggagtactatttatgggtaattcaataatggaagctttgataggtggaataattatagtccttgcactctttattctgtttaataaattcaagtctacaaaaaacggaaatgtctgtagtggatgttctatttgctctggatgtccaagtgctaattcttgctcaagtaaggaagacagcaataaaaaaagtaatacacactaatatataaatattttagtttaaaataagataaaagtgggtgtctcaaaattaactttttagttcatgaggcactcttttttatataaaatcaaatatattttcatcatttcaacagtcaaaaagaggcttatctctattttgagacaacctctttttttgttacttattcagtttcttgctacctaacttcatgtggaacctagtatcttttggaacacttgggtctacgcctcttaatgtaggtatttccccacatattagttgtataggtactataaaattaaatgtttgatagtaaggattatctgtgatatcaatctttaaatttttatcattttctgtaacatctctacctatagcaaatacattttccgtccaaccagaaagtacatcaatcatcttagttactctaggttcttttcctgtatctagtataaatatagtagaatcactatttatagcattatatataccgtgtataaactcttcaaactcatacccagttacaggtattctcattgtttccaataattttaatgctgcttctaatgtatctccatatatatcagagtgacctattattcttatttctttagaattaactaacttttctttgtttctttcaatccattgtttagagagcttatacactgcttcaaatctattaattgcatctaatatcttatttatttcctcattgtacttttcactagatattgtacctttttctctagctatttgaagacctaataacattaagtttaactttgtacaataatatccttttgttttagctccagatttttcttcaccacaatttactgttaatatataatcagaaatctcatctattaaagcattcttacaacctgccatagatgctattttacaacccttatcttcagctaacttcatagcgttgtatgtagaataactactcccaccttgagatacacctactactagggtattttcattatcaaacttgaatgtatcttcagttatcataaatggatacattttcacaacatctatatctaataaattttgtaaatatggttgcacttgcactcctgagtgatagctagtacctgaacctgttattataatcttttttagatttgctctcttaacttcattaaataagctatctgcattagatataatttctctcattctaactggtgtttctaacatataatcttgtattgtcattttatacaccttccttatctatatattcaataaattataattaatttctataacaaacctatagcatgtaaagcgattcctgttactatagtgcctatagttaattttgttacacttacctttctcttcaacatgtaatatattaaaaatgcaaaggttaaaggtaacatattaggtattattttatctagtatatcttgtaaaattacttctgcaccatttaagttaaatttcaaaggagtagttatactcaacatagttgcaaccattcctcctacaacgaataaaccgacagttgtagccatagacattatcttctccataagtccctctctttgtattctttcaagagaatttacccctactttataaccatacttaagtccaaatattctaagggcaaatgctggtatattgtataataataagaataatagtggtccaaagatattgccttcttttgcaagtgatactcctactcctgctgctataatcctaaatgttccccagaataatgaatcaccaattcctgcaagaggtcccataagagctgttttaacagcactaattgaactttcatcaaattctggattattagcattttcttcttccatagctgctgttatacctaatatagcaggaactaccactgtcgttgtattaaaaatctctaaatgcctttctattgcttttgcttgattttctttcttattatatagcttctttattgcaggtaacattgaataacaataacctaagttttgcattctttcgtaattaaatgcaccttgaagagcaaatgaacgccaaaacatacttcttaattctttttttgttaatttattcaaagtcaatctctccttccgttaaagtattcattgctaattgaggattttgattattttctttgttattgatataaaagtttagtacaaatgctacacatactccaaataaagctatagcagttatatctaatccaccataagatgctaacaaaaaccctataaagaaaaatacagacatcttttttgaaatcaacatatccataagcaacgcaaaacctactgctggcaacaatgttcctgcaacacccaatccgtctaatataactttaggtattgcatttatcaatgttgtaactttatcagcaccaatcataattgctaaaaaggttggaactgatgtacttaaaaagaataatattactggcaaccacatcattatggtaactttcttaaaatcagcctgtttagcatagaaaactgccttttgagaaaagtacgaatttattattctaactaatactccaagagattgtgctaatactgctactggcactgccactgctaaagcaacttctgcaccattacctgataatatagcaaaagctgtacccaatacacctcctgttactacgtctggaggagtagctgcacctatccctgcaattcccatccaaattaattcaagctgtgcaccaatcataattcctgattttatgtctcctaaaactaatccaactaacatacctgtaactattggcctatcaaacatagattgaccaaatatacgcccatctagtataccaactcctgctataatagctaacatagtagcttgtactaacatattgaacctccattttaacttagtttaatttacattaaattacattacatttttgattttatttcgattttctaataactcatttacataaacaattccattttttgcttcctctaagcctgatttaactattagttttgtatcctcctcaactaataagaatatagataaaagcattggtaaatttacgcctgtcaacaattcaaatttgaacccttgcaaaagtaagtttgtacatatatttgccacacttccaccaaacacatctgttaaaacaacaaattcttcactatctttattatttgataatatacttctaatttctttctcagcatcatctgctgatttatcttttgtcatacaaaaatactcaatattagctaatgaaccaattattaatttacttgtgtcaacaagttctctagacaattctccatgtgttgcaattagaaattttttcattctctttctcctaaattattttattaaatctgatagttgtttctttttgtctctaggtaacattctaagttctatatcaattcctaaatcacctatttctttaaagttatttatatcatcatcatcaacagcaactaaatctgtaagtttcttttttccttcttcatatcttaaccctcctacatttatttcttttaatactcctcctgaatttttagctacaactaaagcatctctggtattttttactaacactaatacattgcttttctttgaagaagcaaatttttctactatttctccagattcctctaccccccttatatataaagttacattgctaggtttcgctaaattcagtgacatagctttcatttggtcattttttgcttcatcatttgcaactagtattacatttatacctagtgatgttgcccatccatatgcaacctgaccatgtatcaatctgtcatcaattctcatcaaagataccattttccccaaatcctccatcatacattaaaatttttattgtttatactctcatttatctataaaagcaaaaagtatgccaaatactggcatactattttaaatttcatttacttattttgtaatcttgtattttactgtggtagaccatagataatattataaatatatcctatctctgaaattggtatttgcacactataactcttttctagcacactaaatgcattttttattagttttacttcactatgatggtttttgattaacaaatccatatcagtatactcttcaatttcagtttgtctaactaatctttcaatcatacaacttaaatgaacatataaagaaatctttttatcatttggaagttttttcttttgaatattttctatagcattgattccttcttctattctctctattatcttttttgaatctaaaatagttagactgtctattactctaattaatgaaaaattctttacaatagaatcatttatgttctttattttttcattttctactactctactaaatattctaaaaacatcatcttctccttttcctgatattatatcctctaacaatataaaatccaccccattcacatttggattagcagttcctactatagccatcacatcatacatttcaaaaactggttctttatctcccatagaaacaagactatcataatcataaggtattattttgacatcaactatcccaattaaactttcggaaagtagatgttggatttttatagcagtacctatccctgtaaaacaagatgatattatagcatattctttatttttttgaggataatacaattgtatattaggtttagtttcttcatccataatttctgcaatctgttcaatgtttttaccttgcattaataaatttcctacttctagtgcagaaatagtggatatttggtctataaataacattggcccatttatcttattttttaaatcttcatagataagattaagagagcccatatcaaataacacaattaaaccattctttatcctatctccttctaggtatctagacatttgttttgatacatcagcaatggtagcatctataggcatatcaatagctgtaaatatatttttacccaacatccgattacatacattcgccatactactggcagtagcatatccatgtgctataatagtcgcattaacttgattaaatttcattcttataattgttgatttaataaatataatcattatgattgtatctacattattaagatacatatccaatctattcgttattaatgttgatattttacttattatagagtattctttgtaactctctttttttaaatatattagtaatttactttctaaagctttatactcatcagataattgataagattcgtccttcaaataaagataagacgaaaatgccaatacattattcccatcgtattttatattgttattaacttctaaatttctaaatatatcctgcattatcgatattataagctccataagtacgttattattttcatcattatttgaaaagactaaattgtccattagtctaatcattagattagaactctttttactaaatatttcttttgttatttcatttttttctagtctatcaaagtagtctaaacattttatgaaactttgatagattatatttcttttatttcttccatttgacatttcaatactaaattgtttaggagaaaagataatgcttttgcttttaccactttggaattgaaatatatctacattttctatataaagatttctagggaggtcttgaagagtaacaaaaatatttccatttcttctttgattttttgcataagctcgtccacatgcatattttattacatttttacattcacctatattccccttgaattttatctttaaaatcgtatttaatgtaatttgagttatctctataggcaagccaagtaccttactttcttcataaataaaatgttctacaatctttcttttttcaatagtccctctttcttctatattgggaacataaatatttatgggtattcttcttaaaaaagtttgcaaaaatttggatagactttctgttgttgcaaatattaatcttaccctagcttttctaattactccattctctccaatcctagaaaacgtacctgtatccataaatgtaaataacttttcctgaccttcactatttaatctatgtacttcatctaaaaataaaacaccaccatctgattgttctattagacctgctctagattcatttgctccagtatatgctccttttacatgcccaaataatagactagacaataactccaaattattataatactgcgcacagtttaacacattgtatggagaatttttttctaatacattactgcttacactatatttgtatattatcttggctaaaaaagtttttcctactccactttcacctgtcagcattattgtaagtccgccatttggataaagtacagcggtttttatttgttcgattacttcttttaagctattatcatatcctatgatactattaaacacagtctcttgctttaataatttacactcatttttaagttcatctaaattttcataaatacttttttttgtaggtcctactacatcatttattttatttttaggtaaaaaaataacaggtctactgtttatctttataagattatcagattttactaaatcatttaataatctacttgattgagttctacttaaattaaacttttttactatatcttctgttattatgccactttcttttttaagttcatcaaagttgttaaataatacacattcatttacaaaacttaaaatttcatccctcatgttcaacctccaatacaaatatcaataatactataatattagtatatcatttatatatttatgaaaaagataattatattcctatcttgattctcttttgtaaggttgtaaaatcaaactttttataagtataaaatctagattttttaacataatctcaaggttcttatctttccatatatctgacatagaatttatataagaatatatttattgtatttattataataaaaagtaaaacattataggtattttaaaacttattagcgaagaaaatatttgtaacttttattaccttatgaatattatttcaaatttaaaaaggctataaataaatttatttttaaataaatctacttataacctcacaataatacttataaattttattttttcacaatgatatatctcaaatatagttaaaaatatatctatttaattattaatatttaagtaataaattctcactcaatcattaaattcctttttatagtaaattactcttattttacttataccaaatacatttatgtatagatataaataagtactaaaaaaacaattcaagaaaccatatagtaaacttaattacatctgttatttgctcatatctttagacttatctatacaagcaacaatagattttataactgctgctctaaagccttcttcttctaataccttaacagcttctatagtagttcctgctggagaacaaaccatatcttttaattcacctggatgttttccagtttcaagaaccatcttagctgaccccattactgcttgagatgcaaatttataagcttgttgtcttggcattccagctaatactgctgcatctgccatagcttctataaacataaatacatatgcaggagaagaaccactaatacctgtaactgtatccattaaatattctgatactatttctgcctcaccaaaagattcaaacagagccttaatcatatttaactcttcatctgttacattactatttttacaaagagctgacattccctcgccaacaagggctggagtattaggcattactcttactatttttttatctgaacctataaaactttccagactttctatagttttacctgctgctatagatactattattttatttgcatctattaattctttaagtggagttaaagccttttcgcatatattaggtttaagtgctactattaccacatcagaatttgtaacagctacctttgaatcagttgtagtatttattccaaattcttcttttactttatctaaggcaacttggcttaaatctgatacagttatatcttctgcctttactaatcctgactgtactatgccacctatcattgcacttcccatattccctgaaccaataaatcctaaagttttcatatcaaatctccttttttctattagttttattttaaagtagctaaattgactttattttaactgcttaaaattatcttatttttataaaatataaccttattataactataataaattattcttttgtatgtattacttactaatatgtgtatgatttactaaatataaatttaacgattttttcattaaacttaacgagctaacttcctatttagaaagttagctcataattaatctaaaattttaaaaatggaatcaaaccatttatactttattatatcagttacgattttatatagtaagaagttttatttacaagcaaacctagaatgtttgctcagttcttcctattatctcatcttgtagtgttctacttaaattattgaaatggtcactatatcctgcaactctaactattaagtctttataatccttaggattcttttgagcctctaacagtacatttttatcaaatacattaaattgtatatgatgaccatccatattaaagtatgctcttactagattagccatattatctaaccctttttctccttgaactactgatggtgcaaatctttgatttaataatgttccaccagtttttatgtggtccatcttagcacaagattttataactgctgtaggtccattagtatctccacctttttcaggtgaaattccctctgaaactggttttgcacaaagtctaccatttggacttgctcccataatttctccaaagtatatatgacaagttgttggtaacatatctactctgtattctccaccacaaacagttagtctaccagttacctcattgtaatatgcattgaatatctcttgcattatttcatcagcataatcatcatcatttccatatttaggagtcttatttgaaactaaattaagtatagcttcatatccttcaaaattagcatcaagtgctttaagcaatgtatccatatcgaattttttcttatcaaatacattatattttattgctgttaaactatctgttatagttcctataccaacaccttgtatatatctagtgttgtatcttgctccacctctttggtaatccttgcctttttctatacaatcatcaactattgtagacataagtggacaaggcatgtgttttgcacatatattttctatcacagcatttccttctatttttatgtcaatcatataatgtaattgctttttaaatgcttcaaatagttcctcataagattggaaatttctagggtctccagtttcaatacctatttgttttttactaattgggtcatatccattatttaatgttaattcaagtatttttggaatgttcatatatccagttagaacatatgcttctttaccaaaacatccagtttcaacacaaccactggttccaccaagtcttgcatcttctatagtttttccagcttccataagctcttgaactattgcttcagtattataaaatgctggttgaccccatccttttcttgatatttcacaagctctctttaagaatttttgaggagtctttttacttatttgaacatttgaactaggttgtatcaatttcatttcatccataacatcaagtattatataactaacttcattaacaccatcttgaccatctggatttattccaccagtgtttatatttgcaaaatctgtatatgtgctactttcttttaatgttataccaacttttggtggtgctggctgattgttaaatttaacccataaacattcaagtaattcttgtgctctatctctatctagtattccattttctacatctctttcatagaaaggatttagatgttggtcaagtcttcctggagtaaaagcatcccatatattaagttcagtagtaacccctatatgaacaaaccaatacatttgtatagcttgatgataagtttctggtttgtgagctggtacaacatcacaagtttcagcaattagtaataaatcttttttcttagcttcatctgtttcttcttctgccatttgtcttgctttctcagcatatcttttacctaatataaccattgcatcacaagctattgccatagcttctaaatctgcttttttattatatgcatctaaatcattaagaaaatctagctcttttaatcttgcttctatgtctttctttaaatctaaaaatccttttttatatattgtatctccacaaactgtatgtcctggggctctttgttccataaactctgtaaacatacctgcttcatatgctgctaaccactcaggtgtcattgcatttattatcttatctcttgtttgtctttttttccaaaaaggaattatttcttctttatgtatttttctagcttcttctgatacgctaaaatttattatatctctattgtgcattacttctaaatcttccattgtgtgacaacaaatttctggatatgttggtgctccattaggagaatcacctttttcacctactattaattctccatcatttatgctaagagttctattctcaatataatgcttaaatgataaagcacgaagtacaggaatctctacacttccctcatattttttataagcttctgtcataagtactgctctttcaatagatatgtgtggttctgcattaatactttcttctcttaattttttagttctctcaaaagttcctcttgccattttattaccctccaatcttagtattgaaattacttgcttcaaacagtctttttatttcctctaatttttcttctgatggtctttgtagttcttctccttcatactttttataaattttatcatacttgtgtttaccaatattatgatatggaagaagacttactgcttgtatattcaaaggctttaaaaactctatcatttttttaacctctaaattttcatcatctacatttactcctacaattaatggtattcttatatttatgttaacccctaattcacttaaaatcttaacatttttcagtattaagtcatttgattttcctgtaaattttatgtgcttatcctcatcaataagcttaatatcatataaaaacaaatctgcacatttagcaactctttcataattttctgactttgcatagccacatgtatcaattgctacatggattccctttgatttgcacatgtttattactccacaaatgaagtccatatcttgagccattacttctccacctgatagtgttactccaccacccgattcttcatagaaaattctatccttctctatctctttaaccaagtctcttacagaatactcttgaccaacaatctctcttgcattgtttacacaatagtctaagcaagtttcacaaaactcacacttatcttggtctaagcatatttttgtttcacctttgtaaattgccttatgagggcatatatttatacatgcttcacattttgaacatctttcttcattatacaaaacttgttttgtatatgtttgactctctggattatgacaccaaacacattcaagtggacaccctttaaaaaatactgtacttcttatccctggtccatcatgtatgctacatttttgtaagtttataactaatggattcatgatttttcacccctaaataatatccattccattttttcatttttatgcaattcatcttcatagaatatacctatgaaaagcatttctacaattacataatactatatttgttattattttgtctatatatttttagtaatattaaaaaattttattttattatgatatttatattgtttttgtaaattaaatttaaatatttattaaatttatttttataagaaaatatagcaataaactataaacaatacatcattttaattaatttagatgtatatactataaaaattaaataaaaatagagactacactttaccatgtagtctccttctttctggtcatatttagaaattcacatttattgttactgcttttccgcctctatttactgttatttttgtactagcaccttttgagaaagtatacaactttttatttaaatcattcatacctgttatatctgtatctcctactttagttataatatcccctacctttactccagctttttctgctgatgaaccagatattacttctgcaacataaacacctttatcagtacttaattttgtacctgttgctgcttcataatttgatacatctgtaccttttatgcctaaagttactttttcatattttccatttttgattacttcttcaactatactcttagctgtattgattggtattgcaaatcctaatccttctgcttgagaagcttttgctgtgtttataccaattacttgacctttttgatttaacaatggtcctccactatttcctgcatttatacttgcatcagtttgtaataaaccagtcatattagttttttctgtttgtatagttctatctaatccacttattatcccttgagtaactgttttttgaaaatctaatccaagaggattacctattgctattgatatatctccaacttttactttgtcactatcagcaaattctgctggtgttagtccagttttatcaaccttaactatagctaaatcaagttgttggtcaaaccatactactttacctgaagttgttgaaccatcattgaataatacatttacacttgtagcttgaccatctgatataacatgagaattagtaagtatatatccatttgaatcaactatgattccagttcctacaccttgtgtttcagttggtattgcaaacatattactagtatcaacactagttgttgtaatacctacaacagatggcgtagctttttctgcaactgcttgataaatattttgactcttaccatcatcatttacaactatcggcgtagaacttcctgtagatttgcttactaaattgtccttaactaaaattattgttagaaaactactaagtattgaacttattatagcaactaatattactaaacttatccctttctttcttcttgacatctcataccactccctatcttaatataatataaattatcaaaatatatttttcccaatttttcataaaaaaaatgaaatcatctattttgagtaaactccttttcgatgatttcattatattattttaatcttaattaaaccttaactatttaaaattatttaagtcttttttctagctcttccttttctttttcataacctggtttgcctagtaaagcaaacatatttttcttgtaagcttctactcctggttggtcaaatggattaactcccaataaatatccacttattccacaagccttctcaaagaaataaactaaatatccaaaattatactcatctagttgaggtatatttattactaaattaggtacttttccatctgtatgagccaatagagttccttcaaaagctttatgatttacaaaatctacagtcttacctgctaaataatttaaaccatctaagtctacttcctctgaacttatagttatatttctcttacagttttcaacattaagtactgtctcaaataaaagcctttttccatcttgtatgtattgacccatagaatgtaaatctgttgagaaatctacagaagcagggaataaacctttattttcttttccttcactttctccataaagctgtttccaccactcacttacataatgtagttgaggttcatagttcactaataactctacatcttttccttttctatgtaaaattgttctagcaacagcatatctataactatcattactttttaagtcaggattttgaaatgcttctctagcatcatttgcgcctttcatcatagcatcaatatcaagtccagcagcagcaataggaagtaacccaactgctgtcaatacagaaaaacgaccacctacatcatctggtattacaaaagtctcatatccttcttctgtagctaactgtctaagtgcacctttacttgcatctgttgttgcataaattctctttcttgcttcttccttaccatactttttctctaagtaatctttaaatattctaaaagccagagctggttctgtagtagttcctgatttagatattacatttacagaaatatcctttccttcaattatatctaataaatccataatatatgttgagcttatattatgccctacaaaatatacttctggagcctttctttgctcttttttaagtccattcctaaaagaatgacttaccatatctatagcagctctcgaacctaaataagagcctcctatacctattaccagaagaacatctgagtctgattttatcttctcagcagatttttttattctgtcaaactcttctttatcataatttttaggaaggtctatccatcctaaaaaagtatttcctaaaccagttttattatgtaacatgtcgtgcgcaacatctacatatggttgcatgacatctatttcgttttgacaaaaaaactctgtagctttactataatcaaaatttatttttcccatttaaatccctcttttcagcatattcgttttaaagagattataacacaaaatataggtgttttttttaaaagtttgccacaaaatcatacatatctcatcatttattatcaggaaatcgattcttctaaatactataactatgtataaatttaaaaattttagtcaaataaatttacaaaaaaagaaactctaaacgtatcatttaaagtttctcttttatttatcctctattttaaattttatattattttaaattaattatttttaatcatttcctaatctcttcgctataacttgttgtgctatattgacagcatggtcagatattctctctaaattacttattacgtctaaataaataactccattttctatactacatagattattgttcaatctatacatgtgattagctctacaagatttctccattatatcaacttgttcttcaatttttataaccttacaagctaaatcaacattatcagttctcattgattctaatgcataagtatatgctgaaacaactctattatacataacatcaagttcagattgtccttcttctgagaaagaaatatttgaatctattgcaacttgcgataattcagctatatttttagcgtggtcaccaattctttctatatcattgactgtattaaacaaagtatccacaacttctcttgaatcatcatctaaaggtgcttttgaaagtttaagtaagtaatttaaaatagctttctgtaaatcattgattaatctctctcgtctatatgtcttagctattttttcagttgaatgttctactaaggcttccatagatgcatttaggctttccttcgccttctcacccatacgaagtgcttcttttatcgtatttgcaagagctatagaaggagtttctatcattctatcatctatatatttaatagttttagtttcatcttcatctatatcacctgctctatcaggaacaagctttatagctagttttataataagatttgtaaatggtaaaagtatcaatacagatattatattaaacaatgtatgtgtattggctatttgtcttgcaacattgcttggatcccaacttgtaaccatgcttactactggtttattcaagaatattaagaatatcaccgttcctaaaacattgaagattagatgcatcatagctgctcttcgtgcatttttgttagcaccaatacttgataacagtgaagttacacatgtaccaatattttggccataaagaattggcagtgctgctgataatggcactagaccttctgctgccagtgcaaccaacatacccatagatgcacttgaactttgtattattgctgtaatcccaaatcccaataataatccaagtagtggatatctaccaaatgtaacaagtaggtcagtaaatccttgatagtctcttagtggctccactgccatcttcataaaatccatacctgtaaataatataccaaaacctataagtatttcggctatattttttattctaggcttatttccaaataaataaagtataatacctacacctaatgctactggggccataccagttaagtcgaaagataccaattgggctgtaacagtagtccctatattagcacccattataactcctattgcctgttttaaagtcattattcctgcatttacgaaaccaacaaccattacagtagtagcacttgaactttgtattactgctgtaactcctgtacctaccaaaactcccataaataggttactagtaagtagttttattatcttttttagctttgtcccagcagatttttgaagaccttctcccataaggttcataccatataagaacagacctaatccacccattagacttattataatgttcaaattatttcctccttgtaaagagattactgtatctaaaaattttataacctattgtattttatcaaattataggagtgataatgttaaattcatgttaaatattaaaaaatcattaagtttatgttaaatttttgtattattggtgtatttttgtattattttttctgcacattttataccatcaactgctgctgtaactataccacctgcatatccagcgccttcaccacatggatatagattcttaatactcactgattctaaagtattttcatctcttactattcttattggtgatgatgacctagtttctactcccgtcaaaacagcatcatacattgcaaacccattcaattttttatcaagagatataaacgcttctctcatagtctctgttacgaagctaggcaaacattcacttaaatttgtaagtgtatatcctggtctatatgatggctcaacacttcctaaattcaaagaagtcttattgtttataaaatctccaacaagctgaactggtgcattgtaattttttccacctaattcaaaagctaatttttcatacttctgctggaaatgaacacctgctagtggattatcactcttaaaatcttctggcgttacatttactaaaaatgcactatttgcatttattttatctcttgcatgttcactcataccatttgtaactatttcaaaatcatttgatgcagatgctatgacactacctcctggacacatacaaaaagtatatgctgttcttccatttgaaacatgctctataagtctataatctgcagctcctaacctaggatgattataaaaatccttgtactgtgctttatttattaaatcttgtggatgttcaactctagctcctattgcaaaaggtttttgaactatttttatacctcttgaatacaacatttcataagtatctcttgcactatgtccaacagctagtataattgtatctgtatctattttttcagtatcatttattattacagattgtatagaatcatttgatacaactatatctgttacttttgaattaaatctaacttgaccacctaaacttattatttcatttcttatatttttaactacattttttaatatatctgttccaacatgtggcttatgtgagtataatatttcatctggtgctccaaactgaactaactcttctaatacttttctacatcgtatatcttttattctagttgtaagtttaccatccgaaaaagttcctgctccaccttctccaaattgaacgtttgaattattttttaattttctagttgtccaaaaatcacttatatctttggttctactgtctacatcaagacctctttcaagtatgattggttcataacccatttgagctaaaagcagacctgcaaataaaccagctggtccactaccaattaccaaaggattattctttaattttttatcacccacaggtacatttatgtatctgatttcctttatttttgttacatcttttatttttgagttaagtattttattttcatctttgacttctacatctacagaataaacaaattccatttttcctttttttctagcatctatagattctttatatatactatatttgactaagtttttttcttttatttttagcttcttaagtacaacatcttttaataaagatatatctttatcaattccaagttttacattagatactcttaacatattgttttcctctcttagattgtaatataaaaaagctagggttattcctagctttctacaaatataacttctatattctcttttactagattttctacccaaatctcatctagcacaaaattctttattttgtttacaacaagtgttttatctaaatcctttttcaagttttttactaagaccattgcttcaactgatttatgcaatctttcaacatacagagaattaactttaatcaatacaacccttaattcacacacatataacttttcactacctaaggtgatttcatcatcatattcatatacactaaattcatatgtattttcataaggtgttatattttctattcctatatagtccatttatttatccttttttagttataagacctcttataaccttcatgttattaaacaccttttctaagaagttctctgcttcttcattgtctaaaaggtttatttcaaggttttcgttttctacaatacctttagatttacagtactctttagcaacatttattagttcattttttttatccatagataaatcaaactctttatagtctattattatatattgtttggtatcaggtgatacaccattattatatcctatttctatatgataaataactgcatatatttcttctccgttgtacacaggtacagctgggttagattttataaagttcgttgatacagcaattgcatttcctaaactaagactcattattaatacctctttctaaacattatacatatattatactatagattctttatctatgacttaaagctttttataattaattaagatatttttaaatctttgtatctctttcctagtgtactagagcttatatcgtatttctttgatatttgaacttgagttataggttgtcctgcttcttttttaacatagtattcaacagcagctgcccaaccattttcagctccttttatattttcatgatttttcttatattcattccaaaactctatacatgcatctatattttctttttctacattttctttaagagtatctaaaactttacattcttcttcagctaattcattttctgaattaacttttgtatcgtttttatctctttctctctttaaatattcagctatacttgggtctaaaagctgttgtatatacttgtatagtatatgtgtatgataaattaagaacgacttcatatctttgtatacatcttgatattgattgaatagattcataatatcctttaaaattatatctttaacctcatttgatatacttatagttatatctatcaatatgttagttccttcaatatcaactattctagctatcatacaacttccgattttaaaacttctcagaagttttacatcttctgtacaaagttcatttccacttaaacagtcctttaatactatttttccagcagaaacttcttttacctcataaatacttacgtatgattcaaacatactttttaatattgatacttctgattgacttaggtttgcaccattttcttcaagaaaaccaactgtcataacctttttattttccattatgtggtcttgtattaaataagtattaaaaaatctttcaaatttttcatttacactatcattttgcattatataaaacatttctttagctttttcacattcttctttaaacttatcctgtcttgaataatcatataactttgaatataaatctgtatattgtttttgtgaaagttcagtttttctgcatgctctttctgaaacaatatctttatttaaacaacatttcttgtattttttgccacttccacaagggcatagctcatttctccctaacaatatgacttccactcccttattattaaattaaagtacaatttgttattataccatttttttattaatcaatctatagtataagtaaatattctattaaattcacttatattttggtacaatatattaactttaattaggatttcgataaaatcatcaacaatccctcttgtagaaatgaattatcgtaaaactaattcctctataaaattttattaattgataatagttttttactttatctattcttttttgttatatgactctaactgtcattttacattcaacaatattgtctttttcttgtttatattcatttggaatattttgaacatcaaaattattgacttttaatttgttaatttctatcttttcaagtttattatttagtcttaacttcttcattacaccttcaagtttcaacacatttgcaagttctccattaacttttatttctaaattaacttgttttttattgtgattatctaaactactttcttgattaatatattctacattcacaatatctctcagttcattttctactaataacactatatctttatttgtttttttatctaaaaatgagttattaaaattatttttcaattcttcatttttatttaattcaacactttctatatatttatcatctatatgcttattatcctttatttgataattatcttgattatttattttatttattatattttgcttttcattcttcaaactagttaggttttcttccaaataacttactgctatatcacttgccaatataataactaatattaacaatattttaagtagatttttttctctattatttaatctcaaaaataatcacctatctaactttttattctaaatctataatattctccatctcttacaatactgtctatgtaataatattttatgtactttattttccttaggttgtttaaaacatctaaatcactacacacaccttccatctctagcttatttttatctatcgatattttagtaatactatttattccaattgtttcatatattttttttatttcattaagttttattttagaaaatttctctctagttttatctgttgttggtaaagtgtgctttgatttatccactagcttattttgatttatataatcttcaagttcatttatagatttcacatacataaatgatttaaataaaatacacgttaaaattaagactattattattttatagattttattacatggtttagtttttttaaatccattaagaaaatttattgttttatccactttcacttaaataatcattcctatactatttatataatttatcctattgtcttctaaatctgcatcaaaattattttctacttttactttatcttttaatcttaatggatttacttcaatagatttatctgtatatttaaagtattcttcaataaaacaattttctataccatagtaataaacatacttaaaatcccttaataatctttttatgaactcatatgattttccctcttttgatagcaagtatgtttctcttatttttttatcttttgttatatttataattaactgactttttttacattctataaataccccttcttctgaaaaattctctattaaatttaagtttataagcttttgtaatatatcaaaatttatatttatagtctttggattcatatttagattttctgaaatgttcttaattaattgaataatactctttgggaaaagaattacttgtatattcaatttatcatttttagaatttataactttatattttattgaatagttatttatgtttattggaatgtattgtgttatttcaaattcaatcatgcttaatatgtctctttttttcttagtatttagaacttcaacatttctaatgactatatcttgaatttgaatgttaaagtataaatttttatataatatttttgatttaccaatctcctcttttacaaatctaactacatcttctatatatttaatcttctcaatcgaattactatcattttttatatcaaagttaatctcttttataattgatttatctataaaaacttttttatgactttttcttaaaaatacaagccttatataatcatcatttatttctaagtttagaatttttttaattatagccatctccttcttaaataaaaataattttaaaacttacagcaatcaatataaaatattattttggataaaattgtttagaatttatatttacgcttatatctgttccgctatcatttatgacaagttcgaatttacctgatgtactctgaggaactggaacagtatttaggtatcccttttccttcaatgtttctacacttagagagtctattgtcttttcatcatcattaattgccatgctagctgcagttactatattagcagcattcgtatagtctgcatttaatttggcactttcttgaaccttactatacttaactaatgctatactagatataacgcctaaaatagttactactacaatcatttcaacaagtgtaaatccttttcgttttttatttatcaaatttatcaattaaatattctctccttttcaaaagtttcatctaataaaatttatttttctctctaaaaattagtaattgcatcaaacataggaacaaccattgctaaaataaaagtgccaataattaatcccataaatacaattagcataggttctataaatttcattatttgctctattttgttatttaattcattttcataaaatttatttattacatttagacttttatctagtttcccactttcttctcctgtatttgccattgaaataaataattttggaaaaacatttgctaaattcaaagatttacctatgctatttcctttttttatataattattagaaatctttaacctttcataaataaattcgttgtctataacactagctgacatgtctatagcttccacaatttgtattccactgctaattaaaacggacaatgcccttgaaaatcttgttgtagctactaactgattaattttttttataaaaggtattttgaattttaacgaattaatcaatttttttatattatcatttgttataaagaaataaatgcttcctattgaaaacaatataaaactaaatattatataagctaagttatttgtaaccactgtagatattcccattaaaactctagttattaaaggtggttcaattccattgttggtaaaaaccacctgaaaattaggtattacaaatacgaatataaacaacattgataagatagataatattataagtattattggatatattgaaatagttattattttcatttttaatttgtattctttatcataataattagataaatcactcattattatatctaagtttccactagtttctcctgcttttatcatacttataaagaatttagaaaatatacctgttatttgaaatgattctgctattgagttacctttttgaatatgatttgatactatactaagcaaattctttacttttttacttgactgactctcaatgatttcaaatatttttgtaatttcacatccagattccagcaatatgcctatctctttgcaaattactctaatttctttatcactgattctatttaatactaaataaaacttttctaaattataaaatatatttttagataatctcatgtactataataccttccaaattatattaattacaattaaataaacttaatattttctaatttaatgcatttaattttatttcacttaaatataatttatactcaaacatcttaattaaaatagattaaataaagacaactgaccaaacgaagtttaactatacaattcagttaaatcatttcatttactactaaacactcttctaatgtcgttattttttcatttattagtcttttacagctatcttcaaatgttatcattccattattttgtgccacatctttaatagtactagaatcctccatatttcttatacatgtctttatatcatcattaatttctaagatttcataaattgctgttcttccaaagtatcctttatcattacatttttcacaccctacagctaccttagtatttacatctccactaaaattatcttttatcataatctcatggctacaatgattacaaacttttctaaccaacttttgagatataacacctataagagaggcatttaaaagatatggtggtatttgcatttctagtaatctagctatggaagatactgcatcattagtatgtaaagtacttataactaaatgacctgttatagctgctcttactgctatcttagctgtttctgcatctcttatttctccgaccattattatatctgggtcttgtcttaatatcgctctaagacctacatcaaagctcaaccctacttttgaatttacttgaatctgacttatgccatccatcttatactctacaggattttctatagtcataatatttttatttattccttttaaatcatttaataaggaatatactgttgtagtctttccactacctgtaggacctgtcactaataatactcctgctcttttatttattatacgatttatagattttatagcttcctctgaaaaaccaagttctaatttgtcttttaaaaaagtatctctattaagtatcctcaaaactattttttcaccatagacagttggtattgatgaaactctaatgtcaattaaatttccacctaactttatatccaccctaccatcctgaggaagccttttttctgttatatccattgatgcctttaattttataaccgtagacaatgatggatagacatcaactaaaaactttgatacttcctttagttctccatctaccctcattctcactattaaatgttctttaaatggttctatatgtatatcacttgcattttcttttatagctttttctaaaagattttcaaataatttttttgcataatcctcatcaagttcaaagctattataatatttttcaatcttttcacttataagttcttttttctccttcttcaatataatttctttacctgtagctaatctcaagtcctgtagagcataaatatcctcatcttctatttctacaactaaattatcatcttgaaactcaactggaaatacattatatttctttgcaagtttttctggtattaacattggcaaactgctttcctctaatataatattaatcaccctttatatactttaatttattaggtatattcatttttttcatagagatattttcttcagtttttatgcttattttcattggataattggtttgtatgctatctaaatatttactacctttatctacataattagataatttctccttatctccaatgcactttatttcatatggttgtgctacaggaactccatttatatttatatggcttcctgcaagtacaacttctgaatattgattaattctttgaccatttatttctatgtattttcctccgtttacttttaattcatttataacttttacaagaatcttattatagtctatactattagctatattccctgttttttcatctatagcatctatacttaatattatcccactaccctttacatctgaatatgatagactatctctaagtgtttctatttctgatatttcttcagaatttttttgattttgtttcattgaattaatttctttatctaacttgtctttctctttggttaattcttttatagattttcttgtcatttttatttcttttcttattgacttgtctttgcttgtataaactgtttcttcattgctataatctctaaatatggttccaacaagtatacctaaaatagtacttgctagtattataaacacatattgttttttcatactgtattgctccttacaaatttatttttatatgataattttctttaattaaatattaaacatttacatatgcttattatatcaaagttatatattaaaattcatctttagtatataatatcatacattgaactcctatcactaatttaccaatatcaagtatgcatttttagatgttcttaaaattatataaactttcaataaacattgttgtgatattataaaaaaacataaattaggaaaggaaataataattatgaaaaacaaataatggctttggagattattaatatcattttttagcaaaaaaaagtaaaatggcatagcctcaaagctacaccaatttactaaaaattatattattattaacattaattttaaacatatacgtttataagttttcctcatattttaaaattcttttaattaacttatctcttaatttccctacttcatcaaatctcatattaggactatagtaactttctataatatcatgtttagacttggctctcttaagatttagtactgcccaacaaattaaatcatctaaaactttttcatcaaatttaatatcttcttcatatttaagtagtttttctctatttaaaaactgatttaaatcaattgtatcttcttctttaaaagtcgtacttatagttatgcctatatctaaatcagttaatagtacagtttcaattttctctggaataagtggataatgataaacttctacatttaaacctttttcagtagctttcttatatactttgtttaataatgtagttttcccagttcctatttctccatctaaataatagactttctttacatcttttaaaatgttttctgtataatctaaacaccctacaggagttatagctgaaccaaataaatgcttttctctttttagatttcctgtgcttttaactccatcaaataacctttttataaattcttctgtgaccaaatttactttgccataatccatacaatcagaatatttttcttctatgtctctaaaaattggttctgctgactttaaaaacttaaatgctcttttaaatgaattactaatatctttatcataaactgatatttcttgtttattcttttctaattcttctgtattccagtaatcacctaaattaattatctcatccaaagctccaggtagctttgggtccatagtatgtggggcagttgcatccataagtaccacgcctaatttctttataactaaaccatccaacgaacttgggtcagaaggacaatgatataaatcaatatcatatcctctatgcaaaaactctttataaatttttttcataagtgaggattttcctactccaggtccaccctttaaacaaaaaactctttttacattttcaggaattatatagtcaaaaaaagaatatgagccttgtgatgtatttccacctgggaatgccttctttacctttccttccatattagcgcctcctcataatttacaatatctcttaattaagatattcatattataagaattttattacagctttctgattttgacaaatttaaaacttaccatctaatactaataacatattaattttatctaattattatagattctcatactgtaccttattctatctataaatacaatttaagtgtccatattgaaatatttgtattgtaatacagctggatattacttaaatccaattgtttccattataattttatgttaaaataatattacaaaatacatctgtttttcttcataaacgggtgaaattccctatcggcggtaaaagcccgcgagccttatggcataatttggtcatattccaaagccgacagtaaaatctggatggtagaagaaaatagtatatgagtacctttatgtaattttacatgagtaatctatacaaatccttcaactaccgtatttattcatgaaattagacacattcaaggtacctaatatacaggtgctttttttgttgtttattttacaattatatcgtacttataaaatctattaagattggagtgttatcatgaaacaaaaatggatagtattgattatcatctgtattggtgtatttatgtctactcttgatggaagtatactaaatatcgcaaatcctacaattgctgctgactttaaaattaacatgtcacaaattcagtgggttgtaacagcttatatgcttgttgtaacagctactatgttatttttcggaaaacttggtgataaagtaggttcaaatcgtctatacgcattaggattttttatatttacaataggttcttttctgtgtagtatgtcaaacaatttatcaacattaatttcttcaagaatctttcaggcagttggagcaagtattttaatggctactgggcttggtatagtttccaatgcatttccagcaaatgaaaaaggaaaagctataggaatcactggagctgtagttggtataggaaatatgagtggtcctgtaattggaggtataattttagaacattttggatggccttctatttttattatcaatatacctattggtattatagcagtctttcttggcattaaatttctgcctaaacctgttttggatgaacaaaacaagagctttgatatttcaggtcttctacttttcgcatcttgcactacgcttatattacttgcaatgaatgagaagggtaatacaagattgtatttaggtataacagcacttataatcttcttattgttggcattaagagaagtaaaatttgaacaaagctttattgacctacctctatttaaaaatagaaactttactgtaggcaatatcattggagtagcttgttattttcctcaaatggcagtatcttttctacttccattttatttagaacaattaaaaaatttatctcctatgatggctggttatgtaatgactgtacatccacttattatggtacttatagcacctattgcaggttcactttctgataaacacggtgcaaaaaacattctaacagcatctttttcatttatgaccatctcactagttggaatggcacttttaaaagcagattctccattgtatcttttaattgtatgtttagttatttttggacttgggctaggagcatttagttcaccaaacaatagtagtattttagcagatgttcctcctcaaaaacaggggtacggaggcagttttcttgcaactattcgtaatttatcatttgctcttggaacagcattttttagtagtttttttgcacaaagtcttacatacaatcaaaagtttaaaagtcacacatcagcctatgttatagctagcaatcagtcttattggattgcagcatcagtatgttttatagggcttatactaactgttttctttatgagaaaaacagataaatctatttcttaaatgctatttattgctgactacataagtcaataattttttagttgaactaatttatactaattttcccataccttactaaaatttattagtatttagcaaaattactgatatttattgtttataaacaataaggatgccaaaaaaagttcattaaaactattttaaggcatcctatattttgctttaatattaatataattaaaactaactattattacatttattattcaaataaatcttatgtcaatatttaacattttaaatttaatctactgttatttcatatccatgttgattgtattgatttacaatctcttcccataattcttcaacaccagtcttttttagtgaagaaacaggaattactttttcactactttccatttgcaatttttttcttattatacttatgtgtttttgatattgtcctctagatattttatctgccttagttgcaataactacacagttatatccaaagtgctttatccattcatacataagcttatcatctgctgtaggctcatgtctaatatctacaagtaggaatatagaacataactcttgtctactttctagatatctttccattatacctccccacttttctttttcagacttagctatctttgcatatccatagcctggaaggtctacaaaataaaattcattatttattagataaaaatttatagttctagtttttcctggtgtttgactggttctagcgaagtttcttctgttaagcaatgtatttattattgatgattttccaacatttgacctaccagccaatgctatctctgggattccttctgctggatactgtgatttattcacagcactcatagttatctctgaacttctaattttcattattttcaccactctttaataaagcttgttctaatacttcatccatatgttctacaagcacaaactccattttttcttttacattttctggtatttcatctaaatcagcttcacattctttaggaattaatacttttgttataccagctctatgagctgctaataacttttctttaacccctcctactgctaagactctacctcttaaagttatctctcctgtcattgctatatttccaggaacaggtcttttagtaagtgctgagattactgcaagagccatagttataccagctgatggtccatcttttggaacagcgccttctggaatgtgtatatgaatatcattcgtcttataaaattcagggtctatatcaaacttgtccactattgaccttatataagagatacctgtcttcgcagattccttcataacatctcctaattttccagttaatacaatttctcctttacctttaagtacgtttacttctacttcaagtgtaactccaccaactgctgtccatgcaagaccatttactaatcctatttgaggattaacttctgcaagttgatacttaaacatgtcttttccaagatatgtctctaggtcagacttatttataacaacctcttcaagagttgggtcttcaacgtattttttggcaacctttctacaaatcttaccaatagttctttctagtgttcttacaccagcttctcttgtataatggttaattatacttcttaaagtttcatcatctatttttataaagttttcttttaaagcatgttctttaatctgttttggaagtaggtattttcttgctatatttaatttttcttcttctatatacccagatacttctattacttccattctatctaataatggtcttggtatattacctagactatttgctgttgtaacaaatagtatttttgataaatcaaaaggtatttctaagtaatggtccacaaagtccttattttgctctgggtctaatacttctaacattgctgaagctgggtcacctttataatctgctgccatcttatctatctcatcaaataagaatacaggattttttgtttgggcttcttttaccccattaattattcttcctggaattgaacctacataagttcttctatgacctcttatttctgcttcatctctaactccacccaaagatattcttacaaattttctatttaatgctctggcgattgattttactatagatgtctttcctgttcctggaggaccaactagacatattataggccctttaagtgacttagcaagagttcttatagctagatactctagtattctctccttaactttttctaatccataatggtcttcatctaatatatcttttgccttagttatatctaatttatcttttgtctctttattccatggcaatgagaatatagtatctaaatagtttctacttacagatacatctggagacatagaagatatttttgaaaatttatctatctctttttctattttttctttggttgtcttaggtgcttttatttttttaagcttttctctatactcatctgcttcagaatttatatcttcttcttcacctaattctttctgtatagcttttaattgttctctaagataatattctttttgaaccttattcatctgtttttttactcttaaagttattttcttttctatttttaatatatctatttcctctaataatatagaataaataagttcaagtctttttctaatatcaaattcttctaatatttcttgtttttggcttgattttagatatatgtttgcagctatcgtatctataaatctatctacatcttctatatcagctagagatattaatatttctggtgataccctatttccaatatttatatactcttcaaaggcatcaaatacatttcttacaaatgcttcaatttcaacttctgtttcactatccaaattatcactattaaatactatttcttctattactgctctgaaatacccatcttcttgttctattttctttactctaccccttgatacaccttcaaccaaaacacgaactgtatctcctggtaattttatcatttgcttaactttacagattgttcccacatgataaaaatcctcttctcctggctcatctacctctgcttctttctgagaagttaaaaatataagttcttcatccatcatagcttggtctaaagctttaagagatatctctctacctatatcaaaatttaatatcatatatggaaatatagctaatcctcttagaggaattaatggtaattcatgatctattttagtataattttgttccatcaacattactccttttctagtctaattgctttgcttttaatattatatatttgaacaagttaattttcaacattaatgataaattcttagaatactatcatactatattatctttttattatgatataatattaatattagtatacttagatgttatttatcttttggaggtttctattatgttgaaattgtttttaacctttttaaaaattggtgcgtttacatttggtggtggatacgctatggttcctcttatacaagatgaacttgtaaacaaacaaaaacttttagagcaggaagaatttattgattatttatccatagctcaaagttatcctggagtactggcagttaatatatctgtattattaggatataaactttatggtataccaggagttcttatatgtaccttaggctctgctttaccatcattttgtatagtcttagtcttatcgtatctatactttaaaaattcatcatctaaaattttagatggattttttaaaggagttgcgcctgttgtaatagctcttatattgtattcttttacgagcatgttcaagaaactaccaaagtctaaaactaacatactactattaattatagcagttttatctgttggtgtattcaatataagccctatttatttaataattggaggaggtgtatatagtctatgtcagaaataatactactcttcttaatattccttaaaataggggcatttagttttggtggcggttatgccatgctaccatttatccagcaagaatttatatctaaatatcactttataactaatcaagagtttttggatttacttgctatatcacaatctacaccaggtcctgtagcaataaatagtgctacatttgtaggatttaagactgctggcttctttggttctctagctgcaactattggtgttacaatttttgcattaataggtctaactattatatcaaagttattttctaaatttaaaaataataaaaaggtagaaaacttattgacagttcttagaccaattactctaggattcatattatcagcagctttttcatctgccaaagaagttaattgggatttatatggaataattgcatttatagcatcattttatcttttatataaaggaaaaattggttccattgcaattgtattcgtctttggtattctaggtatattactcacatttttatgataatgatacctattttatatttagcatattaacataaaaaaaggagcttttaaagctccttttcatcatcttatgcactttcctcttgatccttaagtactatgataggatttactgagtcttcgttcacagatttctctgttactataaccttctttatattatctctagatggtacttcaaacatagtttccatcattacgctttcaactatacttctaagtcctctagctcctgtatttctttctatagcctttttagcgattgcacgaagagcaccttcttcaaattctagctcaacatcatctaactccaataactttttatactgttttactagagcatttttaggttcctgtaatatctgcattaatgcatcttcatccaacaactctaaagtagctaaaactggtattcttcctataaactctggtattataccatattttaataaatcctctggaagtactttttcatacagcttccctaaatctaattcttttttactttctattttagctccaaaacctagtgttttatctccaccacgtttttgaattatcttctctaatccatcaaaagctccacctaatataaataatacattagtagtatctatctttaaaaattcttgatggggatgttttcttcctccttgtggtggaacatttgcaacagtaccttctaatatttttagaagtgcttgttgaacaccttcaccactaacatctctagttatagatgggttttcagattttcttgcaatcttatctatctcatctatatatattatacctctttcagctttttctatatcaaaatcagcagcttgaataagttttaaaagtatattttcaacgtcttctccaacatatccagcttcagtcaatgatgtagcatctgccattgcaaaaggtacatttagagttcttgctagagtttgagcaagtaatgtctttccagaacctgtaggtcctaataaaagtatattactcttttgaatttctatatccttactactagattttttactgtatattctcttataatgattataaaccgcaactgataaagcttttttagctttttcttgacctattacataatcatttagaatctccatcatttcctttggttttggtaaagatgtagtatcttcatctatagtatcttctatttcttcctgaataatttcgtcacaaagttcaacacactcgtcacaaatatatacatttggacctgcaattaatcttcttacttgatcttgatttttaccgcagaatgaacactttaattgtcgtttttcttcatatttagacatattaacacctctctctatctacggtctctttgtaaatacttcatctattaaaccatattctttggcttctagtgcactcatgaagttatcacgttcagtatccattttaattttttctaatggctgaccagttctttcagataatatctcatttaaagtttcttttatttttaaaattctctttgcatgaatttctatatctgttgcttgaccttgagctccacctaatggttgatgtatcattatttcactatttggtagtgctagtctttttccttttgctcctgctgccaacaagaatgctcccatagaagcagccatacctatacatatagtacttacatctggtttgatgtattgcatagtatcatatatagccattccagaagttatacttcctcctggagaatttatatataaatgtatatctttgtctgggtcttcagcttctaaaaataatagctgtgctactataagccctgctgtggcatcgttaacttgatctcctaagaagattattctgtcttttaatagtctagaaaaaatatcataagatctttctcctcttcctgtttgttcaacaactacaggtactaatgccatggtttcataccccctttattctatataatttacagtagcttttttaagctactgtaaattattatacgcatttaactaaattatatttgcacatcattatatactaaacatttcataacgtcaactatattagttagcgtttattttattaagctattgttgcattatcaactaataaatctattgtttttcttatttttatttgaccttttatatcttctttgtcagcatctcttaaagaagcttctattttttctacttccatattgtaagcagaagccattttttctaactcagccttaaattcttcttctgttgcttcaattccttcagctttagttattgcttctaatactaaagaagacttaactaattttttagcatcttcttttctctcttctcttaattcttccatagttctaccagtcatctctagtaattgttgtaatccaaatccttgatattgtaattggtagttaagttcatttaacatattatctatttgatgttgtatcataacttctggtatttctatttctgtattttcagcaactttttctactactgaatttctagtttctgcatctgctctatttttagcttcttcttctaacttagctcttacatctgcttttaattcatctaaagaatcaaattcactagtatctttagcaaattcatcatcaagtgcagataattcttttacttttacatcatttatttttacattaaatacaactggttttccagctaaatcttgtgagtgatattcttctgggaaagtaacattaacttctacttcttcaccagcttttttacctactaattgttcttcaaatcctggtataaatgtgtttgaacctataactaagttataattttcacctttaccaccatcaaaagctacaccattttcaaaaccttcgaagtctattatagctgtatctccatcttctaaagctttgtcttctacacttactaatctggcatttttttcaaccatttcttgtagtttagcatcaacattttcgtcacttacagtattctcaaccttagctatttctatacccttgtagtttcctaattcaaactctggtttaacttctacattaagaaccataaccaacccattatctttacttatttcttctatatctaaatctggattgtctattgggtctatgtctaattccttgatagcttctggataaacttctgggaataatatttctatagcatcattgtagaatataccttttccatattgagtctctataacaattcttggagctttaccttttctaaatccaggtatattgtatttatttctgcttttattataagccttatttactgctgcttcaaatttattgttatctactgttatttttaaagtaactttattaccctcttttttaattagttctgctttcatccttctaatcctcctagtgatatttatgtaatacccgataacggtattataattcattctatttataattcaaccacttaattatatcacataagtttttttatttacaagtgttccattaatatcgttgtacttatttgataaaatttaattttttgagcgttttttgccatttttttagataaatacacctttatatgcgtatttcttcaatttttatgtcatcttcttctatatccataatgacaaaacttttatacgatactcctcttggaagtgaagtgcttccaggatttatgtaaagtacaccatctttaatttctctaaatggggtatgggtatggccaaatataactatatcagcatcaacttcagttgcctttttttctaacatattagttccatattttacaccatacttatctccatggcataagaatatggttttatttgccacttcaaagacaacttcttcctcaacagcatcaaagtcacaattacctttaactgcaataatacctacattagtcatgctatgaatatatcttgaatcagtaaagttatctcctgcatgaattattaggtcacattctttcaaatatggtattgttttttccatatttttaatcatcatatgtgtgtcgcttactatgcctattttcattacttcactaccctttttataaactcttgtttcataagttttagtgcgtttgctctatgactgattgaattttttataacactaggtatttcaccaaaagtcttatcatatccttttactataaataagctatcatatccaaaaccatttttacctttttcttcaaatcctatcattccttcacaaattcctcttactacaaattcttttccatcaggaaaaactactgctattgcagagacgaatcttgcatttcttttgctcattggtacattttgcatagcttttaacagtttttttctattttcttcatctgttgcatgttctcctgcatatctagctgaataaacaccaggttttttgcctaaagcatctacttctaagccagaatcatctgatattgctataagtttagtcttttttgctattgctctagcttttatcaacgcattatgctcaaatgtttttccatcttctactatctctatacctgctaaatcaacatcttttaaagagtacactttatattcaaaatcttttaagatttcacctatttcttctagcttatgagcattattagtagcaatcactacttcattaccataatccatacccaatatctcatctgctatttcacctaaagcttctctttgaagccttattaattctttattccctttttcgcctaactctaacaataaatttaaatctgctcttgaaaaaggtttctcttctcctgtcccctgtacttctacaaactcacacttatcagtcattattatattcatatctacctgtgctttagaatcttcttcataacataaatctagcatgtgtattccatttacaataccaacactaattgcagatacaaaatttgttattggcatctcttttattgtctttgctttatataatttatatattgcttctgcaactgctacaaatgcccctgttatagatgcagttctagttccaccatctgcctgaatcacatcacaatctacccaaatagttctttctcctaatttattcaagtctacaacagaccttattgctcttcctattaacctctgtatttcttgtgttcttccatcaatttttcccctagatgcatctcttatctttctttgttgtgttgctcttggtagcatagaatattcagcatttatccatccagtaccactatttcttaaaaaaggaggaactttttcttccactgatgcagtgcatataacctttgtctctcccatttctataagaacagaaccttctgcatactttgtataatctctagttatctttacaggtcttatctgttcgttacttctatcataacttctggtcattttttatatcctttctcatattttttattttttataaatttatttttataatttttaattttgtcaaatattaattattgtcatttttcgtaatcttattagcttactgaactattctatcattaattatagtagttttctactaaattaagcgactttttaactctctaatacagcttttacttcatctttcgatgataactttaataattctaaaaatctctcttcatctataactttaattcctaaatcatttgctttagtaagtttagaaccagcttcttcacctgccaaaacaaatgttgtcgatttactaacactagatgtagcttttccacctcttttttctatcatatctttcgcatcatttctttttaatgtaggaagtgtaccagtcaatacgattttcatcccttcaaatattttttctactttttcacctgtattatccaatgattttgtatttactcctacattttttaacttgtttataacgttcatatttttgtcttccttaaaaaactcgacaacgctgtttgccattatacttccaaattcctctaattcttctagttgctcactagttgcagaaattacttcatctaaatccttaaagttatatgcaagtatcttagctgctttaactcctataaatttaatacctaatccatttataagtctccataaatcattttcttttgatttttcaattgaatttattaaattgtcagcagatttttcgcccattctctctaggtcgactacatcttccttttttatataatataaatcagatacatcttgaataattttttcatttaatagcagtgtaattatagattctcccaatccatctatattcattgcatcccttgacacaaagtgtataattccccttcttatttgggctgggcaagacatattgatacattttacagcagcctctccttctaatcttattgttggctctgaacaaactggacacttttctggcattttaaaatctatttcatctccagtacgttcctcttttataacttctaaaacttgaggtattatgtcccctgctttttgaactaatactgtatcatttatttttatatctttttctcttatataatcttcattgtgaagtgtagctctacttacagtagtacctgcaagtctgactggttcaagaattgctgaaggtgttattgtaccagttctcccaacttctactattatatctactattttagttttcttcttttctgctgggaatttatatgcaattgcccatctaggacttttggctgtatatcccatttcgtctctttgttttatattgtttacttttattaccataccatctatttcgtagtctaaattacccctgttatctgtccagtattcaatatgctcaataacttcatctatacttttacaaactttataactctgacttactgaaaatcctagtttttctaagtactctagtgattcactgtgactttctaaatcatattcttctatattttccatattaaatacaaatatatctaatggtctctttgctgttagttttgggtctaattgtctcaatgaaccagctgcaagattccttggattagcaaataatggctgttcttgttcttcttgttgttcatttacttttctaaaattatcttttgatatatatacttctcctctaactattagttcttttttatcatttatcttaagaggtatgctttttactgtcattaagttttgagaaatatcttctcctacaactccatctcctctagttgctcctttttcaaactctccattgttataagttagacctacagaaagaccatctattttaaattcaacaacatattcaacattttctcccacatattcttgaactctcttatcaaaatctctcaaatcttgctctgaaaaagcatttgataaactcaacataggagttttatgtacaatttgattgaatttatctaatggcttacctcctaccctatttgttggagaatcaattctctttagttctggatgttcttcttctaaagaaattaactccttcattaacttatcgtattcataatctgatatttctgggctatcttgattataatacctttcattatggtagtttattgtctctataagtttattaatttcatcttttacgctcactttttgcacctcttcatatttttaaaattaaattattttgaaatttccctataattaattatctcctatttatatattttttagtatatcacttttttgactttaaatttattacaaaaaaaactcttattagtatctttaatacgactaataagagtttttatttttatcaaaattttttatttttaatagcctcttgatatgtctacaacattatctacaggtttattctccattatatagtgtttcaaattattataaaccatattaaatgttctctctttgtttttatctgacacccaagaattatgaggagttactatgacattttcgcactcccacaacttattgtccttgtttaaaggttcactttcaaatacgtctagtgctacccctctaaatttctctacacattcttctaaatctttctgattaactgtatttcctctacctacatttataaatacagaaccatctttcataagtttaaacatatctttgtttactattccatctgtactttttgtagaaggcattgctacaactactatatcacattcttcaaatacaatattcatatcttcagtagcaaaacacttatcaaagtattttttactacttccatcagtattgacaccccatatttctacaccaaaagcttttaatcgttttgctgcttctgaagatatagtacctgttcctaaaaatccaactctttgtccatacaattctgatacagaaaaatccatcttccattctttattttgttgttgtttaaaaaattttgcactatttttatatatttctaaaatatacaatacaatactttcaccaataggtacactatatccgcctctattattagctatcttaatatttctcttcaatacctcttcttttggaagttggtctatacctacactagttgtctgtatatattgtaaatttttcatcttagaaatatctaatctctcaaatggattgtatgtaactagtacatctgctgtatttacatcctcattattttcaatactatcttcagagtaatgtatgacatcatagcctaattctcttattttatcaaatttttcttttccataatttattgtaaataaaactttcatctcaaatctcctctatctacccacatttaaaattttatattctaaaatataatatgatactcaatgtacattagttaaaattactataagatatcttaaatttacttatgttcaattgtttttcctaaagacatagcattacgttcttgaactaaattttctattaaattattcaatgtccaatcaatagatgtctctgttaccatagctgtaaaaggtctatttattctcactttttttagaccttctaaaaatgcatttacttgtgtgcttggagtgttattaaatattacagacttactcttaatcccattttcacattcacttgatatatttccatctaaaatgtctcttattatattctctccgtttttttcacttaagattatatggtctcttattccagcaaagttacttacgtttttaattaatgataattcttttttattaaagtttacaagcataatacacttcctattgtgtattttatctaggttattattatttattttttcaaatgacattttatccatcctttcatttatttatatactttaatttaccccatacatttaaaataatcaatttttatagttaatttttatattaatacccaaattacatttaaatagttaggctatccaaaactaatatataaaattagaataattagattaatatctacaaatcataacctaaaggagagataccatgaatacattactaaacaataaatttagcattaaaaacttttcaaatgcttgggttatagtacttggttgtatgttaatacaagctgttccatttagtattgtagcaagtatacagcctcaatttataagttatgttgtagaaggagaaggctttagtttagcttctttttctctaatattcactattggtactattgcctcagcaattgcatcaccttttataggtgtattattttctaaagtcaatattaagatactatatttattaggttgtataatttctagtattgcttttgctactttttctatatgtactgaactatggcaattttacactgtatcatgtattgttcaaattggcgctacaattatatctgctataggaatacctgttttaataagtgcttggtttgatgaagaaagcaaaggaaaagctttgggctttgcttttgctggtggttctattggtagtatatttctacaaccacttgcagttcgcttattagcaactcaaggatacagtcattcttatctaatatttggaattatagcattaatagttggtatacctgtaatattattcatactcaggatgcctaaagatattaatgaaaaggtaaaatctaaaggtaaaaaagagaaagcatctgatacaatttctccttcagtatggggttatacattaaaagaagctaaaaaaattaaatatttttggattatgactattggatttatatttgttggtatatatgtttcatcattatccgtacaatatccaacttatcttagaaattatctaaatcctattctaataggaacagtaggctccacatttgctttatttgctctcattggtaatttatttggaggattattgtttgataaattcggtcaaacaaagccacttattatatcttttgtattggttcttatagcaactttatcattactattggtagataaatcttctacttttgcatttgtatttgccattttgaaaggtctttctgtatttgcttatatgattggtcctgcttatttaactggctctttctttggtcaaaaggagtttggtagcatatatggaatcgtacaattaatttttgcagtgggatttgcattaggttcaacattatttggattgttagttgataattttggatacagattttcttggtctattataattttatcagttataattgcctatactttacttattataacttctataggaatgaaaaaattgaataaagaaagattagataaactaatgcaataattgatttttagatatataaatattataataaaaaagatggagcttttaatcataaataaaactccatcttttttatattacaatatagctaattttctcttatttttaactttactatctatatcctcatccttaactatagtaaatgccttagttggacaaacatttacacatgcaggcccttctggcgattctatacaaaaatcacacttatttgctgtcattctttctctaaagcaaagctttccttcatctacatcttttaatgtaactatgtctattgcacctataggacatgctaacatacaagtcttacatcctatacaattttcttcatttatttttattgtgttcccaaccctaactataccaccatttggacatgcctttgcacaaggagcatcttcacaatgtctacactgtattggagcacttacttcttttgtctttatgacagaaagttttggattaaaatttatttcatctggattttggtaaaaaatatcttcatctgaatgtgcaactacacatcctatcatacaagttctacatcctatgcatttatcagggtctgctataacaaaatagttcatcacttagccacttcctttcctatacaatatgtagtgtgtaatagatgatgagatttttctcctaatggttctaccagatattcatcatacagttttttaatatcaggattctcatgagattttctaattgctaaatgttcatcatgcacgtatgttgcttttgttctattttcataagccaattccttatattcttctagtaaaatttttggttgacctccaccacttacacacccaacaggacaagtcataacttcaataaaatctacatctaattttcctttttccaagtcttcaagcactggtattacattttttaatccacttactactccaactcttaagtctaagtctcctattttaatagttgactttctaaaaccattttctcctcttacttgttttacttctacatcaggaatactttctccagttataagctcatatcctgttcttatagcagcttccataaccccaccagtaacaccaaagatagttccagctccactataactacctaaaggactatcaaatttttcttctcttaaatttttaaaatcaattcccatgtcttttattaaataagctagttctctagtagttaatactacatctacatctctatatccactagaatccatttcttctctatcacattcatattttttacatgtacatggcattatagaaacactaaatatctttgatgcatctacattatttatctctgcaccataagttttaaatattgcaccacccatctgctgaggtgatttacaagaagataaatgattagttaatttaggataatttttttccatgaattttacccaagctggacaacaagatgtaaacattggaagagttccaccttctgtcactcttttaattaattcactaccttcttccattatagttaaatctgctgcaaaattagtatcgtagactctatcaaaatttaaagctctaagtgctgctgccatttttccagcacctaagtatcctaaataatatccgaaatcttctcctaaagcaactctaactgctggtgcacattggaccatagtgaatacatttgggtcacttaaagctttctttaccttatctatatcacatacattgtatgctgcaaatataggttcatttatagactctggtatctctctttcttgttttttctcttgtaaaaactcaaatccttcatctataactgaggcataagatttacaagtttgaacacattgaccgcacataacacatctatctaaatttatctcttgtggctttccctcttcaccttcaatagcatttactggacagacctttgaacattctctacatccagtacataaatccttatctatatttattatcataaacgtcacctacccctgtatcctttatttatttgttaacaataaactaagtgcagcttgtctattcttagcttttttgtcatctattggagtaacaagttttaatgcttcctgaggacatgcacttatacaagctattttttcattgtctttacataagtcacatttataagctatcttcttattttcatctaaaattacttgttctacttctttaccatcttcatattgtggaagtaagtctatagctccaaaaggacatgctagcagacaagttttacatcctatacacttttcttcatttacagacataatattgttttctttgactatagctttttgtggacatgagtttaaacaaggagcatcttcacaatgtctacactgtattggcatacagaaattgtcaccttttactaaataaagtctaggtataacaggtatatcaactgttccaactgtataacccacattattatgctgattatgcattgtaaaacaagctacttcacaagctctacaacctgtacatttgtttgggtccgctattacaaaagagcctattttatttttcatattatcccacctttcaatttgtatatttccaaccctctagttactttcatcatatgtctacttactttcatcatatatatttatatatttcactattttctcagtacttatatttcgtttacattttttgcacaaattgtatgtgttattatacaccttatcagtatcgtcaattaatactccacagatttcacactttgaacatttttgttcttcttttttagtacacatatacttattctcactttttgataactctctgtggatttgcataaatattcatccgtcttcctcttacaaatccaataagcgttatatttaattttttagaaagctctattgataaattagtcggtgctgattttgatactacaataggaatttgagtcatagctgcttttaatatcatttccaatgatattcttccacttacagccacaattttatcttttaatgttatgtcatttaaaacacaaaatccaatagccttatccattgcattatgccttgctacatcttcacaagtgactatttttttatcaaaattaaatacagatacgctatgtaccccaccagtatttttaaataattctgatgaatttaaatttctatccattatactgtaaatcgtatcataatttatttttatattgctctttacagaagcacatgttatatagtctagtgaatttaaaaatataatttgctcatcttgatttttttgtttctcttgaatagttacttttgcaaaacgttcactctcatttatctcaaattttaataagctttttttgttttctatgtatccttttgttttcaagaatcctactataagttcctctaaattatatggggtacataaaaatgtatttacatatttatcatttaaaataaaactaagtggatattctgcaattatttcttcattatctattgatacttcatgttcatttattttgcttacttctacattaaaagaatttaaatatttgtagtccactagactataactattttcaaaaactttatccttactattttcttgtaatttagtttttgagtatatattgttcataaaatattagcctttctgccttttataaatcttaaatctaataaatcattagatatttgtagctgtcattttgtctttcaaactttgatactcttctcttacacatttttctgctaattcttggtcttcaagtttttcaagtttaacagcacaatatttatactctggtgttttagatatagggtctaaatttgctattgtaagttcattgcaagctccaacccaccactgataagtcatatatgttgcaccttccttaactctatcagtaactgttgctcttgttattacacttcctcttcttgaactaattctaactaattcatcatcttcaattcctaatttttcagcatcattagaatttatttgaacacgtcctggttcatcttctaatgaactaagtgttctacaattaccagtcattgttcttactgaatagtgtccaacttctcttacagtacataaactaaatgggtattcatcatcttcaacttccatagggggtctccattcagcagcgaacaaattacctttaccattaggagtagaaaacttttgaccttcatacagatacatagttcctttatcttccatactttcactcttacaaggccattgaacgcatccttgagtttctatcttttcataagtagcacctaagaaacttggacataattgtctaagttcgtcccatatttccttagtatttttataattcataggatatcccattgctgtagaaatttcgcttataatttgccagtctggttttacatctccttgtggctctatagcttttctcatcaattggaatcctctatctgcacatgtatatactccctcatgttctccccaagaagtagctggaagtataacatcagcgtgaagtgctgtcttattcataaatatatcttgaacaatgacaaattccaattcatctaatgcttctctaacttctgatgcatctgggtcactttgcactgggtcttctccaaatatataataagctttaagctttttctcttttagtactaagtctggaacttgagttaaactataaccattattaggagataattttaccccccaagttttttcaaacttttctcttatcttatcatcagttacattttgatagccaggatatacattaggaagagctcccatatcacaagctccttgaacattattttgtccacgtacaggtcctattccaacgctttctctaccaaaattacctgtaagtagagcaattgatgcaagtcccttaactacatcaacagcttgaccaaattgacagacacccattccataaagtatcatagcttttttcccttttgcatattctctcatagcttttcttataagctcttctgggattcctgtaatcttttcagcatatttagctgtatatggtttaacaatttctttatactcatcaaatccttgtgtatgattttgaacaaattctttattgtaaagaccttcttctattaatacatttccaaaagcatttactaaaaccatgtttgttccaccttttataggtagatgtatatcagcaattcttgcagattcagttactctagggtcagtaacaattaatttagcaccattttttttagcttttactattctatttgccactattggatgtgaatctgctccattatatccaaatataaataaaacatctgcattttctatctctggtatagaattagacattgcaccactacctaatgagtaagccagaccggctacagatggtgcatgtcatacacgagcacaatggtcaacattattagttcctattgtagctctcataaatttttgcattatatagtttgcttcattaccaggtcctcttgcagaacctgttcccataatagaatcaggtccatatttttctttaatttcatttagtcttgaagctgtatagtttatagcctcatcccattcaacctcttctagtacaccttgttttcttatcattggcttttttagcctaggtgttagaattttagggtcatttagaaaatcccatccataacgaccttttaaacacaaactttcttgatttgttctaccattagccggttcagctcttaatatcttattatcttttactactagatataattggcatccagctccacagtatggacaaactgttaaaatttttttctccatacaattccccccttagatttatcccctgataagtaaaatttatcttaaagataatgagtgtttttataatatgcaaaatcataaatattttgcaatactatctattaaattcaacaattttctcacaattcctcttaaatttcaaaaaaaatatgtcataataatctttatatttcaaccatttaattaaaatattctagttcttatgacatattttttaatatactcaatatatattctttaaacttatttagttttcacttaaaacaatatttctgccaattctatttttcattctatagtgagtaattacagtaaatattccacttccaatcagaattaaatagtacataaatccaccatataaaaatactgcatatcccatcaaaggttgagggaatactgatttgaatatagtgaaaaaggctaattcattagctcctacattcccaggtgttggtattggagatattgccatatataaaaatgcttgtaatgtcagtatataaatatagctataaccttgtaaattaaatgctttatatatccaaaatgaaacactaaagtaagcacttaattgaataaaagttactattatagttgaaattaatacctttttattctttgcaaaaaaatttattgctttactataatcatctataaaactttctatggattcaatcttattatctaaaaattttaaaaacttaatttttgataaatgctttatagtaattctcataaaatattttatttttttagggtttaaaataactaatattatcataattaagacaaatgaattaatggctatccctagaaacactagaggcataatcattttcatttgtttttctaacatagcaaaattcattaatacaagtattgtacaataaaaagtaaccactatttggaaaataatagacttattggtaacaactgcacttgccttactaagtggcattttacattttttaagtacatatatctgtactggttggcttcctgaagcaaaaggagttattaaattataataaaatcccataatggctagcttaaaaccaataaatctaatattaactttgtgagtgctttctataattatcttcattactactccttcaagcattatgtgacacattattgccaaagcacctatgaataaaaacttcttatctaccataaccataacatttgatagcattttaatatccaatgttttaaacactaggtaaattgttatacctattaacaaaaataaaaatgtatactgtagtaaactctttctaatattctttagtctatccattagaaataaccatcctttgctcaagatttatactaaatactatattattagtatacactatgaatcttaatattttataacaaaataccttacaattttgtcatttacaaaaaatattaatctataaattaaattttaatatatagattaatattttacaaacattttgtagatatatataatattttcactaagcaacacttatacttattacacccatttataccctatcccccatacagtttctattgtataaatatcatattgttttaatttgcttcgtatattttttatatgctctgtgatagtacttatatcactttctccatcaaaaccatataccgactcatatattctttcttttgaaaatacttgtcccttattttttgctagaaattcacatattagatattcacttttagtaaaattaatttttttaccatcaattgaaacttctttgcctaaaaagttaaattgaacatttgagatagttaataaattctttttttctctactttctcgccttaaatgagcagttatcctagcccttaattctcctacaccaaaaggtttggttatatagtcatctgcacctatgccaagaccgtacataatatcactttccatattttttgctgtcaaaaacagtattggacaatcaaccttatttcttatagttttacatacttcaaaaccatccatcttaggcatcataacatctaatattattagattaaaataattaaaatccatgttcatagccttttctacatcactaattacctttacttcatgtccatctcttttcaacacattttcaatcaactttaacatatctaactcatcatctactactaatatcttagacataataactcctccatttatccgtttaatagtattctaatttatatctttaataatatctttaaaattcacattaaccataatactctcatattatagcttacaataattaattactattttacaaataaaatattttagatacaaaaactttatatttcaaaaactttatattcattttacacgcatttacttaaatataaaaatttatttaacaatttattattgtaatattttgaatatataataaaattaataataagaaaactttttataaatacacttttaattgtttaaattggaggaaaaaattatggatgaaaatataacaaaaaataattataatgttccatttgactatgttcgaaaaaaactcaaagaattagaccctcatacaattagtaatttaagtaatatacctttcaataatgatttaaatagattcacactcaatttttttgatagacaatatattatagactatccaagtggagaagtttggaatagtaatggtagcctttgcaataactttgagcttaaaatcttgatagttagatatttaatcaatgctaaaggtatccctagaactaataaatatgtaacttttaaagaaataccaggaggcaatgtttattatccaaattttttaaacaggactctatataggctttcagaagtttttacatctcaaatagacaaatataagttagttatggagaaaattggagctgaaaaagtaaacatgggagatttagcttataggtttacatatatgggtaatacatctatgatatttatactttggtttggagatgatgaatttcctccaaattcaaatatattatttgattctaatatagtttattacttcaatgcagaagatttagcagttgttcctgatacagctataaatgcaattttaaataaaataaatcaattataaatataaataatattataataaagtttttgatagatttaatagaatataatatgaaatggggtaaaaaatgaatgtagaaaatcaatctttatcagatattgaaataatattatcacacaggtatgataatggtgcagactattggactacacctgataagcgtttaataaaaggttctcctttctctactcttgatagtgtactttatctattagagttaggtgtgaaccctgatgatactttacttaaagaatgtgctgacttgatatttagcacatggcgagaagatggacgtttcaaactatatccaaatggaggtatttacccttgtcatactgcaaatgctgctaacgtactctgtcatatgggatatgcatctgacattagaatgcaaaaaacgtttcaacattttttagatacacagtatactgatggtgggtggcgttgcaataaatttagttttggtcgaggtccagaaactgaatactcaaatccactaccaactcttaatatattaaatgcattccgttttagtaattatctaaataaagaatcaaaacttgacaaagctgtagattttctacttgaccattggactattaaaaaaccactcggcccttgtcactatggaattggcacattatttatgcaagttgaatatcctttccgtaattataacctattcctttatgtctacgttttatcattttataatcgtgcaaaaaaggataagagatttttagaagcattgaagatacttgaatctaaaatgataggtaataaaattgtcgttgaacgtgtagttccaaaactatctaaattatctttttgtaaaaaaggcgagtcaagtgaaatagccacaacacactattacgaaatattaaaaaacctagaaaaataatagttatatagataaaacatattaaaaaatagtggctttaaattttttaaagtcactattctatataaatataacattataaaaaatatattaaactatttactcttttttaaaaccgttgattttcttgctatataaaaaactattattatagaaataactactagagaacctctatttataaagaaataattctttaattcattaaatctaacatctatattattaggcatataaaacatcttttgaatataaaatccatttacattaatcatactaacaaatgggtacatatgtaaaataaaaaatatatcagcaaatgtatatgtaattaatattgctattgttgtaaatctattttttgttaatgttaatatcattagtggaaatgttgtataccataataatgtaggaaatgtctttaaaaacacatctattggctttacactataaacaaaatctattttgtctatgttaaaacctttcactgacgtaaatgtatatactattgtaattgaaattaataataatacagtatatatagctaatataacacaccatctaaatactataaattgattatatttttttttattatataaagtaagtatctcatttatattacccaaataatcttttgaaaacacataaattattgtgattgctgacattattggtataaaaacatctgatatctttataattcctaaccatcctgctatagaatatgtatccattataggtacatcattataaaatattaactcattataatctaatatgcctgtaataaatatgcataatatagaaataattacaaatattaacacatgtttaagctctatttttttaagctcaaattttattaactccaatatacacatttattttaactccttatgtaaaaagtttatataagcatcttgtaaagttgtatctatccttaagctatccttaagtttctctgtatttttacctatatactttacttgcacaccatctttaactcttctataatcaataatatcaatattacgttctaaatattcaaattcatcattagaaactactactgaatacacctcaaccatatcaataaatttattaattgtaccatcatataatattttgccttgatttaatataattaatttgtcacagttaaattgtatgtcttctactatgtgagttgaaattaatactatagaatttttacttatttctggtaacaatcttctaaattcattcctttgctctggatcaagaccaactgtaggttcatccataactattaacttagaatcacctattaaagcctgtgctatacctagtcgtctctttacaccacctgagtatgtacctattttattatttataaacttgtccagattaacttttgatactactttttgtatatgtttctttaaatcattcttagatacacctctcattttagctacaaactctaagtattcttgcccatttatattattatacatatcaaaatcttgaggtatatatcctacatttgccttgattttctcattgtttttgctatactttatattatttaattctatctctccaattgaagtttcataaagagtcactaataacctcattaatgttgattttccagcaccattaggacctaataatgcaactactccatctgttagggttaaatttatattatccagagcttttttatttttgtaattaaaatttagatttcttatttctaacttgtttatcatattaacctcctttattatttatctattataaggatatttcctgaaagccaatgataaatagttatgctaattttctctccctttgagtcttcatataaaaattcattgctaggtaagtcagcaactaatatcatattaattttttttctttttattgattccataacattatctacttcatctacatattttttagcatctacagatgctttgctatcacctaatatttcatttcttgtttcaattaaaaatttaattttttcctctatatccatatttacattactatctgatggatagattatttttatatcatcttttacctcttctttaaactcacctgcatatattgcaatatcatttgactttccttcaaatatataatctttttttaaaaaattactagtcttattcagtaaaggtaaatttgaatagacattatttttagaacttaaatttattttataagccatacaacttgattgatttacttttgggtaccacgctaaagaacctggtggaagcataatatcatctttagtagctatatatttattttgattccaagatgtcaacacattaatatagccttcatactctatatctaatgtcacctcgtcattaggctctaaactttcctttaaattaacttcaattaaatccttttttttgttaaattttatattttccgaatttacttttatatattttatatcaaatatttcatctaaaatcatattaatatttgttaactcttcatttgatgtgtttaataaaacaattctatcttttatatttgacttgcttttaaagtcaatcttcatatcatgcgattttattttaatatcactaatattagatttctttaaatactctccataactacgttcctcatctctatatgttgacatatctattgatatataatttaatccaataaataaaatactgtacactactataactattaatgatttaatctgtttctttctaatatcatttaatatcagatatgctactattattaaagtaattgcaaatagtgtaggtataatcttatctataacatatgctgaattattaactttccctacaaaatcagaatagtaagcatatgattgatcttcaaatatattaagtgatttaaataatgctttaaaaaatggttctttaatatcaataactctatccaacatcttagttgatgttaaatataaaaatactgatgataaggtaatctttagtattaaattatttataataactgaaataaatgatatcactatagataaaatagtaagtggtaaaaaccattcaaataccaatataaatatagttgatttaatcgttacaattgataatgttcttattaaacttgagtatgctatagcatatataattggtatgcaacaaaatataaagttgtttctagttacagcaacagaaatacctaaaaaataatcaaaattatttctacataatatttttacagtatcataactttttctcatataaaaaattacatttaacatggttaaaatactaattgtcatacaagtatatacactcaaggataagtaatcattaaatgaaattcctctattggatatatgtgtccatcgttgtatgagatggtaatttataataataactgttattgcaaataaaatattttttctaattattttggttataaagtctgatataaccttaatactactcatatttatgcccctcctagccaatcctttgatacaacttacaatagattcaactatatttaataagttcaaatatttaccttgacattattttttaaaattaatattaattagtgaaattaattaatttagaaaatgttttataatcttactgatcattattaaccttcattccaatatatattaatatagcaatccaatatatagaaattattgcataaatcacatattgctgaaaaatattaagtattttacataaaataattaaacatattattacgaatagtattttttgcacagtctttctataatgctttttctcactttcactaagaggtttgtttctatgttctaaaggagctaacttgtaaattgttagtatactaataatcattaataatactaataaatacttatatttatttatatctatattattagctgaaaaaatagttatcaaataaataactgcaaatgttaatgtacactctttataattcctagcatgataacctcctgtgaactgtcttaaagtgcaataacaacttaaaaatataactgtatgtataaatctatcaaaaataattcctataaataatgctaccgaaatattaactatgaaataaatcaaagtttcaaatccatatctatatatttcaaaatcttcactttctacaatctcattattaactaatatattggcaaatttatatgataatcttttaaacatatttcctcctcaacatgtaaaacctctcctttaataagaagaggtccttttattaatgttatttttttagtttttgtaaagcttgtggctcttttgcctgatgtgctacccaagaacttgcactgtttgctgataatacagctatcccaaaacttaatgctgagatgtttttaagtaagtttaacgctatttttttcattttgtactctcctaactttttattggtatcattatttttaatataaactcattatctgagtaattaactattgtttcaccaccatatttatttactatatatttaatactagcaagtcctattccatgtatcttatcatcatccttactagtttgaatacgtttatcaataagtttaatatcatttaccttagtatttataaattttattattgcaaatttatttatatatgtagctttaacttctattcttttttctagctcattatttatatccatacatgcttcaattgcattatctagtgaatttgcaaatattgaacatatatcattattttcaataaagtttaatttagatatatttatgttatcttcaatttgaatatcatactttttacaaatacttattttttctgctaaaattaaatctaatgttttatttccagtatttttaaaatgttcaaattcacttatctgaaactctaagttatctatatatgatataatttcttctttagtgtcataattttttatacaaatcatatggtttttcaaatcatgataaacatattttaatctatcatgaacttcgtttatattttcataattcctgtagtttgtttttattctttcatttataagttcatactctagatttaatttatcgtcttgtacaattttccctattactattaaaagtattatacttgatgataaaatcaataaaattgcaaatataaatataaataagttttctgtagtaattgtattgactcttaaattatattcaaatataagtaataagctaactatattagataatataggtattcctattagtatcatatctttaggtttaaaatctaaagataatttaaaatacttaaacaatataaaacctataaataaaaatacctttgacataataatagcttgtattctaaataagttttcatgttgtgttatgttaatattatttaatttatttataaatactactagacctactgcagaaccttcagcaatcattaatcctagccaaaacaataaactaactattatacttttatatattttatcttcatatgatgttatataaaatgatattcctattaccatacatagaagaatcttaatatttggaaacactttaactacatttatgtatgccataaatataaatataattattgttgtaaatatatatcttatattagatattttcctctttccaactaagtggattactaaaaaaaatataatccaatctatagtacctgaaactaaattaataatattccaaaatcctatacttagatttgttagcatactatatcccctaatatattagttatagcaagtttcaagcctttaactctatatttacttattggaatacttttgccatctactataacagtacttccactcattgattctactaattttaaattaactatatagctattatgacatctaaaaaatccatattcatttaatatcttttctattttagatatactcattttagtaatatacatatcatcatgtgtataaatcaatatattcggtctatctgtttctatataagtaatagaatctattttaattcggtctacataattttttacatttatagttaagtaattatttctctttttcatcatctcatttatacaaggtaatacacttttagaaattttttctttatttattggctttagtatatatctgtatgcttttacctcataaccttcttgcataaactctacaaatgaagtaacaaatattatttctaacttatgatcaaactctcttatcttcctagcagtatccataccatttattgttttcatttgtatgtccataattaatatgtctaaatctttaggatagttatttagtaactcttctcctgatgaaaattcatatatgttataatttataggatatgaacttaatatttcacttaatatatcttttatttttattcgataatgtagttcatcatcacatattcctatactaatcacaattcttaaacatcctttcttatatatttttaataaatatataaaatttctattcattttacatattttaacatacttctgtagcaaatagctatttagattttaattttagctttttggacattaagtattactttttggatttacaatctattttaattttcattataatacaattttttaatatatattgaatatatttagcgattttaataacatattcttcgagaagtttttagtatctagtttttgttaaacaaaaagtatgcaccttcctttttatagtaatattttaattatcgctataattttgaagaatacacactatattttaaatattcatataaaacatattaaaaaatagtggctttaaattttttaaagccactatttttttaaatgatgttcctgaaaatatattaagttagttattctaatcaatttgaagacttttgcttctccttgcctatatctaacataatttcataatttaatttacctttctttaaatcaactcctgagttacttctaataatcccacaatccaacatttcgtcaaataccttcctagataaacctagtttctcacgtaataatgttgatacctttaactgacatggatatttactaataatatgaacttgtgtaaggtcattaatattaatttcttgtcctactattttatactctggaataccaacttctgctccatttctatgtaaaagttccgtattcatagcatattgcttagcaagattataatcgtttgtatggaattgttctagtgtttctggatttaagctttttggattgacacgagaatatatagttgagttccatgttgaatcacaatttgaacacttgtatattaaccatatatccaaatatttatgttgagcattaaccctaaataaacctgaacaaatatattcagtcttttttccacatttcttacaatacctaattacaggtaactgggagatatattccacctcccaagtaatttttttcataaatgcaacttcctttctataagattactaaattaatagaaagttatgaaaaggtggaatataatcaagtatttttttcaaaacaagacctcctaattttaataaattttaatttcaaacatataaaaagctactacttcttattagatactttacaactctattcgttatctgctgtacaagttattgaaattatttaaattatagcatccacttataagaaactatacctcaaacacttttatcaaaagaaaatgagccagtataattataaaactatactggctcattcttaactatcttttcttttttcttgtaatacaattctttgaatacttttcaaagacaagtaatatttttctgataaatatttcaaatcatatccaacttgataatcttcataaatttgcatatttctaattgataaatcttcacgagtagacgtactacttccccattcttttttattattagactttctaggaatatagatatattctccatctacatattcctgtatcaattcaagtaattcttctggtaatatatgtattgcttttttatagctcattctgcactcctattaaataataattttttattaggaatagcaaagggctatttatatattaaattttatatttgcaatagcccttgctatgcaaaaataaagattaaatcaaacataaatctcacccctccttatatattgcaacgatacatataagtctatcagcagtataaatagttgtcaattaacataacttcttcatctaacctttatattatctttatttattttcataattcatctattttagagactaacttttttcttcttattagatatatttaaagttattaatcaacataagtcctttatcttgagggatttattaccgaacaaggaaccccaactatacactttccacaaatatcacaaccacctatataagtgtattttttttcatttatcatacacatttcataacacttattcctattaaatccatcttcttttaaagcttctttcacgcatttgttgacacattttttgcaactattattatgtttatacaagcagtattcattttctggtcttttagttggctctaattctaaacttgtgattatgcttcctattcttccacaacaccctttttctgtaataagcatattatttaaaccaaatgttccaagacctgctatgaatgctacatgtctttgtgaccagtcacttaccaatttttcactgtcaaaattatacgacccaggaatagcatatgaattagcccccatcttctctagttcttcacataagaaatcatttaaatttgaaatcaacatattagtttctatgtacgctcttgcccatatttcagaacattcaaaccctccaatattactattatttacactttcatcaaaaggtataaaatatgtaattatagtttttccattttccagaaaatcttttggcatagcatgagatgttcctacaacactttttagcttctgaaacatatcatcttcagcagatgcataagcaaacaaaagttcttgccactttgtagttatattatttgatttatgataattttttacaaagttgttcattgatgtttcaatcttatttttcatagtatcacccctagataattctatatttccaatttaatgttattattttatattatataatagtattttataatatgcgcactaattaatattaaaactatgttcatcaatcattcttaaaaaagctcctaatatcaatacgatattagaagccttttcttatctaatctaatttattgcaattcctgcacttgcatatcctgctacagtattaactaatgaaagacctgaagctgttgcagtaaatactagtaagaatcgagtttctgctgttgctgctatatttaatcctgttacaattccactagaaattgaaccaactgataatatacctgtaagtggtggagctagtgtaactgtcgctcctggtacagctgtaaatgagttatttggtgcagtagattggtaaagtgttgctgtaattgtaattgttgaaccaacaagtgaaagtgctgctgttgtactgaagtatgctgaaatagatgttattgttccatctcttggcattgaaaatgcaaagttagtcaatgtccctgctgcgtttgtaaggtctattactccaccaactatacttaatcctggagctgaactaccaaagccaacaaaacctggtgtacctactaatcctccagctatagttgtaagtgatagtggtatacctgatgcaaaaggtattattgcactagcacctgttgggcctgttggacctgttgcccctgttgctcccgttgctccggttggacctactaatccatctgcccctgttggacctgttgctccggttgcccctgttgctccatctgctcctgttggacctgttgctcctattgggcctgttgctccggttgctcctgctaatcctgttgctccggttgctcctgttggacctactaatccgtctgctcctgttggacctgttgcccctgttggacctgttgctccatctgctcctgtatttcctgttgcccctgttgctccggttggacctgctactccatctgctcctgttgctcccgtcgctccggttggacctactaatccatctgctcctgttggacctgtcgctcctgttgctccggttgctccagttattcctactccggttgcccctgttggacctgttgggcctactaatccatctgctcctgttgcccctgttgctcctgttggacctactaatccatctgctcctgttggacctgttgctccggttgcccctgtcgctcctgttgctccatctgctccggttactcctgttgccccggttggtcctattagtcctgctgctcctgttgcccctgttactcctgttgggcctgttgctccggttgctccggttgctccggttggacctattaaccctgttgctcctgttattcctattcctgttgctcctgttgcccctgttgggcctgttattcctattcctgttgctcctgttgctcctgttgggcctgttactccatctgctcctgttgcccctgttgggcctgttgggcctgttactcctgttgctccatctgcccctgttgctcctgttgctcctgttggacctgttattcctattcctgttgctcctattgcccctgttggacctgttgctccaggtgttcctgtcgctcctgttggacctattaatcctgttgctcctgttactcctactcctgttgctcctgttgggcctgttggacctgttactccaaatcctgttgcccctgttgctcctgttggacctgttattccatctgctcctgttgctcccgttggacctgttggacctgttactccatctgctcctgttgctcctgtcgctcctgttgggcctgttgggcctgttgggcctgttactccaaaccctatagctcctgtcgctcctgttgggcctgttccccctgttgctcctgttggacctcttaatcctgttgctcctgtattccctgtatttcctgttgggccagtcggaccggttggtcctgttgggcctgttccccctactcctggacctgttggacccgttggtcctgttgggccggttctacctcttggacccattgggcctgttggacctacacatgatggtggacagcaatgatggcaatcacagctattataatcatcacgaccattattacaatcatcatatttatcatagccattgttgtaatcattatcatcaaatggtccaaaatatttatttctactcattattaaaagcacctcctgatatatttgagcttttaagctctatatataatatgtcaaatttagtatgattgtgacctatcaactatttttaaatttactaaaataattttcattgtgcaaaacagcactatcgttaggtttgatttcttttgttttttcatgataataaatagctttatctgattctcctaacctgtcataacagacacttaattgtatagatggtatatatccataacaatcatttgacttaaaacctccattagtatcattcttatctcttgttaatgctaccttataccaaaaaatggcttctttatatttttgtctatcaaacatatgctttcctatgtcacaacaaatttctgctcttggctcatcaaattcgaaacttctaaacaatgaatataaggcacttttttcatcattaattaagtaataacatgtggctaaatctctgcaggcactgatacaatcctcaatccatcctcttgatgagtctaaaaacttagtaaaaccttctattgcttctttatacctagcattatagtacaactctctagagtaatagaattggtgtcttggctccaatgtttttccttctgaaatcattttttcaaaaattctaagatttcttagagggtcctgtctatgaagctttttatgagatattgcaatgtcagaataaaatacctctccaaaaagaggtactacttcatgaatagggtcaacccatttatgattagaacttcttttaaacaatcgttctctataatatgagagagttgggttaccattttcatcaaaggatacattgtattttgccataacaatatcaatggaagtatccaagctttctttaatctttaataatttttctctatcagcttctaaaattatgtcatctgcatcaagccacatagtatagtctttagaagctttagaaaatgaaaaatttcttgcagcagagaaatcatctatccattcgaaatcgtacaccatgtctgtatattttgagactatttcttttgtggaatctgtagaaccggtatctacaattataatttcgtctactatatcctttacacattctaagcatctgcctataacttcttcctcattcttaacaatcatgcacaaacttattgcaatcataatgtacaactcctttgtcttctatatattgcagacataagtaatatatggtattttctcttgttttgttattaaatttataaaaacttttgacgacagaaagttactaaagaaccttatcttttatgtattttttatagtagaatttattaaacttgaaatttggtaataattgttgaaatgataaaaccatatttaatttcatacaaaaaagagtgtcccataaactaaaaagttcattttgagacactcttatttaatattatatatatatttgtaaaacagacattttaatatgatactttgatactttattcattcctattcattcctattcattatataatcaatcagcccgtactctttagcctctagtgcagtcataaaattatctctatctgtatctcttctaatatcttctattgatttacctgtattttcagaaagaattttatctaatcgttcttttattttcaatatattatctacagctatttttacatctgttgcttgacctttagctcctcccattggctgatgaatcataatctctgaattgggtaaagcacatctttttccatgtgttcctcctgcaagtaaaaaagcactcatacttgcagccataccaatacagatagtcgatacatcacatctgacataattcatagtatcatatatagcaaatcctgatgtagcagagccaccagggctatttatatatataattatatctgaatctgggtcttctgattctaaaaacagtaattgagctactactaaacttgcaatagcatcattaatttcttctcctataaatataattctatcttttaataattttgaatatatatcataagacctttccccttgacctgtttgttcaattacatgtggcactaaactcatgctactttcacctcacaattaatattaaagttaagataagaattgatttcatctcttctttgtttataattcatatttgcataagaaatacatttttcgctttgaatttgatgatttagatttaaaacaaatctctgttgaataggataaaattcatctttatttctatatacttgtggagattctttatataaatttctaaatgctagtgtaaaagattgatgtgtagaatatcctactgtaatagctatatctataatatatttgtctgtaaatataagttgtctagctgcttcagtaagtctcctcctctgtatgtattgatggatagtacatcctacaacatttgtaaacattctgtgtaaatggtattttgaataattagcaatataagctattttatctaaatttagattttctgtaagattttcttctatataatcaattatctccataataacatctgtatttgttttcaactctatcctctccttttaagtattataacctatgcaaaaagttttttcttaatataaattgctatcttaatttagtgtatagcaataaagtatcgataaaacaatatcaagtatttttatacaaaaatattaatatatatttcttttaaagtttaaacttaattacatctattatatgtagattgctacatgttttatctatgtaccttgattcatatgtattattttgctgagtatttttacacctttttcaatttcatcaaaactaagatgagcataacctagtataatttcatggtcatattctaatatattctcaattgcatattgttgtataggataaacttttatacctgcttcaaaaattttatgaattaaactttccgtaaatttaacattatagaaatgagcaactatatgaagccctgctgcttcaccttttattttaaattcatttttaaattccgtgtttaaaacttttatgagatatttacgttttctattgtacaacttcttcattctaaatatgtacttctctaaacctccatttccaataaattcagctaatacatattgcaatattgtttctgtatgaacatcagagtacatttttaaggttttatagctttctaaaatattgtctggtaataacataaatccaacacgaatagctggagataatattttactaaaagaacctatgtaaattactttatttgggctaagttcataaagagaactaattggttgaccctcatatctaaattcactatcataatcatcttcaattatatagtaatcattctctgttgcacatttaataagctctagtcttctttgaataggtaaaatccctcctaatggatattgatgagaaggtgtagtataaacaaaagaaatcccctttattgattttattaagttggtattcattcccttatcatctactttaattccaacaactgaatatccaatagatgaaataacctttaataagcctttatgaatagggtcttctacagcaacctttttattacttttgtataaaagctgtgaaattaaagataaaccttgtgttgaaccagaaacaatcataatgtttttggaattacatctaattcctctagtacgaaataaatacttagatatttccactcttaaaacccatacaccagctgtacttccatatctgaaatccgaatctgataaatcatacagtatttgtttatatagctttgaaagttctttgcgtggaaatagttttaattctggaactcctgaacgaaaatctatataatttttttgtttattagtatgtaaatctttttcatctctaaaagtatcatttaacttaaaatcaactttatgccctgatattcctttagctacaattgttccatatccattccttgtttccaaatatccttctgcaattaattgattatatgcatctaaaactgtattacgagatacagatagttcttttgataaagtcctagatgatggcagtttttgctcaaactttaagcttccatccagaatcatatcttttatctcacaataaatttgtcttgataatgatatattactatttctattaatcgtaatccacattctaatacctccaaaagtggttctataaaattactataaaaatggaactacaaaatccacttttaacttgctaagattatatcataaaatataaaataaaaaggagtctatattatgttagaaatatcacataaagttaaagaaatttatcccaatattaaatttggagttatggttataaatattacacattcaaaacctaataaagaaaattttttagttcttaaaaactctacaattaaaaatattatagaacaacacccagaatacaatcgtaaagaaaaaattaaaacagagcctgtttcaagttatataaagtattataaaaaattcaagaaaacttaccctgtattgcttcaattagaatctattctattaaaatcaaaaggtatcccagatgtaggtgtaacaattgagtcaatgtttttagcagaattgaaaaatcttcttctaacagcaggtcatgaccttgataaaatggaattacctttgaaaatagaattagcaaatggaagtgaacatttttatggtataggtggtaaagagcatattttaacaaaagatgatttatttttatcagataatattggtatattatctagtattcttaatggccctgataatcgaacagctataacaaaagatactaaaaatattatgtattttgtatatggacctgataaaatatcagaaaagcaaattcaagaccatttaaatgacataaaacactatatttcaagtgcttttccagatttaaaagttaattcaattgatatattttagttaatatattaaaatcctcataaatattttgaataaataaattagtgaagtatacattctagttaaactagatatacttcactaaaattaattatatgtagatattatttattttgaattttgtttataataaacactttattacatttatcctatgaataacttaattttataattaaagagtttcataagaaacaatttcacttaaaggaacacgagttttttcatgtctctctgggctctctggtatcttagattcatatcccatcaataatatatttattggttctagattatctggcaaactaaactcttctctaattatatctggattaaaatagcacacccaaacacttgccaatccaagttcagttgcctgtaacatcatatggtctgtaactatacttgtgtcaatatctgtaagttgtctcccatcaaaaggtcttgtccaaactttgtctttatctccacatacaagaattgctaatggagcatcatatatattggcagccttagaaagtttatttataccttctttttcctgaataacaatcaatctttgaggttgacgattaccaccagttggagctattcttgcaacatctaaaaccttctcaagtttttctttttcaacctttctatcttgataattacggcaagaatatcttttttttgtaagttcaacgaaattcatttatttaccccctattgttttattaggctaagttgatgatttatttaacctatgctataattttatcactatggtactatattacaataatgcacttttttgtaatatagtatctaaaaagatactttaaaataaataaaggagctcaaaaatgaaaaaatgtttagataattacagttgcccaatagaagcaacacttgcattgattggtggtaaatataagacacttatactttggcatcttaaagacactatattgaggtttaatgaattaaaaaaattaattcctaaagcaacgcctaagatgttaactcaacaattacgtgaattagaatcagatggtttaattataagagtggtttatcctgttgttcctccaaaagtagaatactcgctatctgattttggaaagagtattattccaattttagattccatgtgtgactggggttctgattacttagaaagtctatagagcattacagtttaaatcccattgctaatttaacttcatccatttgttctctagatgtcaacatttctaaaagcttaaaagctacatgtggagctgtttctggacaatatgaggttataatatttttatctacaacaattggttcattaactacatttacatcaaactcacttaactgtctttgtcttttaccatttttcaaatgatatgtagtagctttacgattttttaaaacaccactttttccaactggcaatgctgccacacaaatagaagcgattattttttcttttgaattaaactcccttattagatttaaaaaagatgaatcatatgcttcatcataaaatccaaattcttcaaatcctccaggaatagctagggcatcataatcatcaacacatacttcttctatcgtcttatcaactaatacttgtatattaaatgtactcataacttgttttttaaatccacaagtcactacatcaatatcatgcccataatcgttacgagcccatcccataacatctacaaatacactaaattccatagtttcaaaaccttttgctaaaaaaactaaaactttcatattctattttcctcctaaaatataattaacactttactagtaaattatttaaaaaatatcttttattgtattaaattcttctttaattgtagataaaacaatggttgtattagctttttgaatccccccaatttccttcaaagtcactgatataaactcttcaagattacttgtatcttctgctaatacttttattaagtaatcatactctcctgaaatatgatgacattctaatacagtatcatattccaatatagttttcttaaattctttcatacttttagataaatcagtattgataaatataaaagccaaaagcttatattttgttttttcccgattaatttgaatagtgtacttttgaattaaatttgactgctcaattttccttatacgctctgagactgctggtactgataaattaatttgtctgcttatttcagaggttgaagccctactattcttttttagagaattaattatttttaaatctatttcatccagagctactcacctccttaattatttaatacaattttagctaataatttacattaagtaaataaatttaatcatttcaataaaatttaatacaaatatgttatttttccttaaaattttagttttctttaatcaaaacacatataatacttaaaattatttaagttgaattaatgtttttattttgtataatatattagaaccttaatatatcattgaaaattcaacaatactagacatatacttctacatgttgtaatatttatgaaaatagtatccctatatcaaaagtataaaactcataatcttaattttcccatagactataaaattttattggtagcgagtcttcaaataactttgtaatgatagatttactaaattaatataatatatagcaaatataactttcttattgactataaccaagtattatgataacataacttaagctataattaataaaacatattttaaataaataagataatccacaaagtacaaaagtacaatttaaatatagataaactagaattaatactaaaattaggatgtgaataattatgatttatatagaattagttaaacttgttagaaaacttaactctacacaaatgtatacgatgaagcgttgtgtagaggttaatctgaaagcttaaagctttctatcttcatcggcaaatataggtttagtatagttttttggctatgcttatttaaaattacctatttgccgatagatagtatagattttctggtcatagacaacaatgcttgtctatgaccttttgtttttccaaaagcagaggtcggcattttacaatgccattcctctgctttttttatttccataaattttttaataaaagaaaaggagtttgaattatgagtttattaaaagtaactaatttatcacaatgttttatggataaatcactgtatgagaaagctaactttgatttattcaaaggtgaacatataggtgtagttggccaaaatggtacaggtaaaagtacattaattaaaattttattgggagaagttgttccagattcaggagaaatcaagtggcaacctaatatcaatataggccatttagaccaatatgcagaaatcaatagagatacaacaatatcactctatttacacactgcatttgaagaactttataaaatagaaaaggaaatgaatttactctatcaaaaaagtgctatatctgaaaatgagcaatatctaatcaaagcatcagattatcaggaacaactaatagcaagtaatttctattctatagataatgaaataaataaaatagcaaatggtcttggattagattcaataggaatgaatcgtgttgttgaagagcttagtggtgggcaaagggcaaaggtaattttagcaaaattgctactttctaaccatgatgttctattattagatgaaccaacaaactttttagataaagaacatgttgaatggctctcaaattatttaaatacatttaatggggcatttattgtagtttcccacgattttgattttttagaaaaaatttctacaggtattcttgatatagaatttggtatgattaaaaaatatcatggaaaatattcagagttccttaaacaaaaatcacatttaagagaagattatattagaaggtatcaagcacaacaaaagaaaatagaaaaagaagagacatttatacgtaaaaataaagctggagtaaattcaaaaattgcaagaggaagacaaaaacaattggataaaatagaaagaatagctcctcctagttttacaggaaaaccaaatattcaattttcagaaattgaaatatcggctcaaaatgctcttactataacaaatcttgaagttggatactactattctttacttccaaaattaaatttttctgttgatggaggtcaaaaaatagttataactggttttaatggaatcggtaaatctaccttgttaaagacattagtcaaagatattcctcgtatatctggagatttccagttttcagaacaagttaaaattggttattatgagcaagatttaaaatgggaaaatcctgataaaaccccacttcaaatagtagcagataaatatccaaaattaaatacaaaagagattagacgtcatctagccagatgtggtgtgaaggaagagcatgtttcaaggagtgtatctactttaagtggtggtgaacaatctaaggttaaattatgttgtatgatgttatctccttgtaattttcttattctggatgaaccaaccaatcactttgatgcagagacaaaggatgctttacaaaatgctttgaaacagtttagaggaagtataatcctagtttcccatgaagaaaaattttataaaggttggattgataaagtgtttaatatagaaaaacaattagtataagtttatacacaatatacaatattatttaattgatatttcaatgcaaattttaatgttctagttaatgtttcactgcaaataaactaaaaaaattttattagaacataaagtacattaccaggatataaacttaatgaggctatctcaaaatagagatagacctcttcttcattgttgagataacgaaaatacatttgacttcacacataaaagaatgcctcattaactaaaaattcaacttgagacatcttcattaatattaaaatctattctaatcgattctattcacaagtttatatcctagtcctttaaccgttataagtattttaggatttgaggggttatcttcaattttttctcttatatgtcgtatatgcaccataattgtattgtcacaaatactactatatactccccatacttgttcatagagtctttcttttcctataattttatttacattttgagccatgtagcttaaaagatgatactcccttccagttaactcaatctcatttctatctttatatacacggtttccttctatatcaatagtaatatctcctattttaataactgcactatctgatggtacaatgctttgatactgttgtctacgtaattgcgctttaactcgaaaagcaatttctcttggactgaatggctttgttatatagtcatctcccccactactaagacctagtattttgtcaatatcatcattttttgatgataaaaaaagaatagaacagtatgaaaactctcgaatttttttacacacttctataccatctatatctggtaacattatatcaagaatgacaacatctggacatgctatcttacacagcgaaatagcatctaaaccattataagctttaataatgtttttaaaaccatcatttatgagtacttcttcaattaaatctactatatctttttcatcatcaacaagtaatatttttttattaaaatatgtatccatattgaaatctctccataaaaatttattatattctaatcttgcagtatcaatatcttgtttttttatattcactactcttgcttttacattactaatagtaacatctctaatagacaaattcaatcactatgaaaattaagataagtttctttaaaataaagtgtatgatacattaaaacctatagaaaattaatttcatccaaagtttataatattagactaatacacttacagatacagatacagattaatacaatagtaaaataaaaggagttgtcttaaaattgactttttctaatcaaactttaagttcaactcccttttaaacttttatatgttatttttattaattctttatatcaattataactttaattttcaatagtatatatctaccactaattgaattacttattaaaacataaaatatctacctaaactatttatttaatatctacatatatttatatctattcttatacttacatatacaaaaaatggttaaaaataaagttaaaatctcagcacttggtactgctaaccatatcccatttatatttaatatatttggcagtatcaataaacctatagttataaatccaaatgtacgtagaaaagataatattgcagagaccttgccatttgacaatgctgtaaacatagacgaagtaaaaatattatacccacaaaaaataaaactaaaagaaaatatataaaatccagaccttgcaatttcataaactcggcttcctctttgagaaaaaatctctacaatgattggtgaacatgatatagaaaagataaataccaataaagatgccactgaaataaataatatacaaatcttaaaaacatgatttaactgtgtattattttcacttccatagttataacttattattggtgcaacacccattgagaaacctatataaagcgaagttaaaagaaattgagaataaataattattgtaatagctgcaactccatcctcaccaattaatttcatcatcatagcattaaataaaaaagtagtaactgctgttgatagttgacctaccatttcagatgaaccattaaaacaagcttcaaataatattcttttatctagtctgggtatacaaaacttaagtaactctttattttttgaaaagaaaaccatacctgaaacggtaggaattaggtatcctactccagttgcaagtgctgctccactaatacccatttgtaacagaacaatgaacacatagtcaagaattatattagcacacccagcacctaacactagccataatccaaattgaggctttccagctgttacaaataaacattgaaataatacttgtagtatatttgcagaagcaaaaaccaagataataaaaagatatgaacgacaatatttaattaaaacttcacttgctcctaaccatataatgatataatccataaatacaatacctataccagtaattattaccccaattacaactcctgataatacgattaaagaaaaagctttatttgctccctcaatatcaccatttcccatcttacgtgctacaatagcacttcctccagtggcaagcatagttccaattccaactataagattaataattggacatacaatattaattgctgatagagcatttgtattaataaatcttgatacaaatatagtatctacgattgtatacaaccccataaaaatcatcataaaaatagtaggaaatgcaaacttcaatagagtaaataaattaaatctttgtgccagtaaattatcttgctcataaagattatcttgttcatgattttctgaataatatacatcactcattttgtttatttttctgtacattaattatttttaaaatatattccaaacaattagacatttacagacctcctttctgcataagaattatatctaattatttggatatagttttaattaatcttgcttttttacacaattatatttctactaaagaaacttttaaatccttactttaatcattttatagctttcagtgcctttagcgcaaatacttgttcacatagtttagtgtcatatgaaacgtatttatatatagttatacattgtctatttttactaatttattaactacttgcacttttataatgtctcatacctaacttccaaaatctccacataaacaatgtaaacaaaaatacaattaaaattgagtatattaatccattaattgttattgtcccagccaaaatttgagtcggaattgtcgacataattccatatggtaagattaaatagaataatactttaaaaacaccttcatatattacaccaggaattttcatattcattggcaataaattatcttctaatctcattatcgcagaagatgatataacaaaaaatgaaactgttctaagtatgatacatacatcataaaaaagtaatgtcatcaataacaccatgaaaatatatattattatcataactaaagttatctctgagtttaacttagatattccatataaaacaataagtatacttgctagaattaatggtgatgaaccaatattaatattttcaaatgttaacctaaatagtgggtctaatggttttgtaatatagtagtctaattctccttcttggatttttcgtggaatatcataaataccaaaaaagaaaatcgtcatatttatcgcatttattaatgagaaagttcctataaatattaacatctctccttgttgccatccccctattgagtctacatgagaatatatactattaaacattagaagttgtaatataaataatgaactatctacaaaaaatgctccaaaaaaatcaaatctaaataccatcatctttgataatttcatttttaataacataaatattattttcaaattttttttcatcatatacccaccccatcaaataatgttctcattcttttatacataactttatttactacagaaaaaaataaaacccataatgctagaataattaatccttgtattgcctcattgctgtttctacctattagtaacatagatggcaaatatgttgtataataaaatggaaataccttcataactgttactatagtttctggtaagagtacaagtggtatcattgttcctgtaataaattcaacaatattttcaattatcattctaaaaaaactaatctcaagaaatttaaatgacaaaatcccaataaagaagtggagtttcatcataaaaataaaccctagaaaaatcatcaaaattgaaattaatatttgaactggatttgatgtaaaggcaaaatctattttaaatataaaaatccatacaaatgcagaaatcatattaaatacaaaataaaaacatgtcattccaaaatttttagcaataaaataattttgaacattaattggaataatcatgtactttgaaaatgtgcccaattttacacgattacatatctcttcactggtactctttgacatatcaatacctgctaaaaatgagcttattatatagtaagacaacatagagttaaatgtaaaaccagagactattttattttcaccaaaaattgctttccataaaatataagcaaataaaatttttacaatcgtaaacaccatattaaccaccacatcaaatctccagataagttgcactttaaagttaattttggctacttcataataccttctaatactttgtttaaatttataaaacattgaataatttgaacttgcttcattatagttgctcataatactcatcacttcctttcttatatattctctctacaatactacctatatcttcttcttcaatcattacatctttaacatcatatttatcaaaaatccatttaatcgtttcatttcctctttcttttagcacaattactgatgtcttatgatttgtttgttcaacaactttacaatcttttggaaatacaatgttagtttcattggaaaaactaactgttatttttttatatttttgaaaatgattaaatagtttctctgtagaaccatcatatattttacggctattttctacaacaatacttctactacagagactcttaatatcttccatgtaatgagaagtaagtataatagtagttccttttgtttcatttacttcttttaggaaatacctaatttgtttttgggctatagcatctaagcctatagttggttcatccaaaaataatatttttggattatgtagaagggctactattaattccattttcattctttctcctaaagaaagcgtcctaacttgaacatttaaatagtcagatacctcaaataattcgataaagtaatccaagttttttttatattcttcattagatatatcatataattctttaaataaaagaaacgtatctgctggtgtcaattcaaagaatagttgacttttttggcccataacaacagcatattgttttttaaaattattttctaatttgttagggtaataacccataacagatatttctccagaagacggtgcaataataccagttaacatcttaataagagtagttttgccagctccattttgacctattaatccaacaaattctccttcttctatctttaaatcaaatgacgatatagctgttttttctgtatatttcctattaaataaagactttacactccccataaatcctgcctttttctcaaatcttctataagatttagtcagttcattaagttcaattatactcattttaactacctccatatttcataatttatataaaaaaagtccacaggtatatatctgcctttttctgtgcttatatttaacagcacaaaaacagaaaactcctgtggactagaaaaattaatgctctctatttcaaaatagttatcaaaataatactatacaaaattaataaaagtgtagcagattaaagcctactacaccataatttaacaaagtaatatatattttaaatactatttgttgtcatatgtcagttatctataaaggcagaataagacacaaaaattaaatgtattaaaaatacacttaaaatttctgattatacagaatatatgtgtctccaactatttaattgttggttaccattatataactccgacatcaaggcactcctctcataatattattattgatatcatatcataaaggttatttatgttcaagtatggatttatatactaatacatttagcttatttcttcagggttgaatttaaatttcatttataatattcgtttataaattaaaaatataatacgtatattaaaactggttattttactgtaatatttttattgtaaaagatatacttttacctatacaggatgtaatttctttagttctatattataataatattgtaataagagttcaacttataatacagtaaaatataaactgtaaatcttaagggggtaatctatggaaaataatacaatacaaaaacaattaagagatttatcaaaaaaaatttggcatatttatattttaaatccagaagaagaaaaccttaaatttattatttccttattagataacaaccttgcattaattggaacaggaaaacatgaattttacgaaacattagaagaatttattataggtcttgaaaaagaccaaacagaatcagagcaaatagactttgagattatagatgagtggtattcatgtaccaaagttacagacgaagcttttatagtatatggtactctttgggtaatagaaaaagattacctagaaaaagatatctatgtagaaatggatactcgatttactatggtatacagagttacagatgatatgattaaacttatccatgttcaccattctattccaaactttgaccaaatgaaagatgagtattaccctaaaacaataactgaaaaagcacaagaagcactagcaatggcaaatgaatttaaactaaaatcagaaaaagaccttatgactggactatacaatagacatttttttgaagtacacataaaagaaatgcttaaaactgtttcatatggatacttttacatctttgatttagataattttaaacaggtaaatgatatctttggtcatgttcgaggagatgaaatactaatacagttttcaaatattttgactaaagtattcgtaaatgatgctattattggaagacttggtggagatgaatttgctgtttttgaatatagtaatcaatcaaaagagaatgttgaaaataaagcaaagaaagttttagaattatgtctagagagtaattcttgttctataggtatatctaaattagaaaataaatctgatactttccagtctttatacaaacaatcggattatgctttgtattattcaaaacgaaataataaaggaaactttagttggttttagtacaaaagatattaaaataggcaaatttattagagtatcttgtcctatatactaataagtaaagtaaacaacaagctatctttgcatatatttatataaaccaactattcttaataaaactacaatagtcaacatgaccactattatagaatataataaactaaaaacattattaacatgattaatattatattttaataattttatttttaaaagtaagtccaaaatgttatattttttgattaaaactgatgttgatataaaaaattttacttaaaaaaacacttagaaaggctttataaagagccttttttgcttttattgattaaattttcatataaaattccttattaaatttcaaatcaataaaaaaaggctctttataaagcctcccctatttttattgattaaatcctaatatagacaatgccttagcatcatagtaagtagtcatctctcttgttgcatcctttaatttacggtaatcaaagtctaatgctccaccaaaagctgatatttcagacccatcagacctataccatttcccatcaatttgtatatagttccaagcatgatttaatgatggatttaatatagatagtgaatccattcccattaaccttgttaataaatgaaagctacttgcaaaacttccacatacaccacgtttatcaaccagattaccatagactatgttacaatatttagagtctacatattttgcttcggttaccaattttgcagctctattagctctttccatctcagatgcatttctccagtcaaaactatttaaaaaattcctgattactgtaagtgtatcttgagcttgtttgtaagaaatccaatctccatcggctattacttctatagggtcaagttttccaaagcctattctctgatatgagctacctgacaatgctgctgcataaaatcctagcccttccatacccttatttatataataatatttaccatctgctcgaagctcaactccatttggatttcctccatagagtaaattaaacttatttttttaaaacatattgtttaaatcagtacatttatatgttttttttgttcatctgttttatcaaatatattagtctttgaattttgtttgtattcttcagcatctttatctaacttttctattctcgactcaagtttcattatttcttcttgtgttaaatttataaaatttttaagcatattttcaagctcttcacgagttttacctactaaagataagtcctcagatactttctcttttttattagaatcctctttataatcctttttttgttctaactcttctaatttttcatcatttaatatttcttcttcaattttttcattagactctttagtgattaaagattctttttcatcatttgtatttagataagttgaattttcatctaacattgtacttttatttttatcttctataatgctatttttaatacctatttctatattagaaaagttattagttgtttctcttatttctgatttatataagttcttaattgcttcatttatttttttagtataaacctcttgtctatattttaaatctctaattctatcattaagttcttgcttttgtttcataatattagataaataagtgtcttttcctacagtttcatttttcttaaccatactttcatttattcttgtattatttatattactttcatgtctaaatgaatattgacttctatattgactagatattttcatttatttcacctctctaaaataaatttatgtttataaaaaccaacttaacttaattatattttatcatcaaaagtatacatttacaaatattagttaatagttttataggttcgagcattgttttcaacaaaaaatttttattataaattaaaacaataatttttataaatatcttatttgtattttataattcatatatttttactttataaattagcaatattgcagttttgctcttaagaaacatctctatcatacataagcatatactctattatgtattagtataaatatgccttttcttatcttacataagacctctttataaaggagactatcgtaacaaatatgtatacattatcacatatatatatcatcatataaaaaatcaaactttattaaaaaaattaataaattgctttaaataataccacaaaccaaatttgccatcaaaatcacattaaagtaacaaattaatggcaaatttaatacattaatagtatatagactcatagaatgaacaaaaaaactacacttatcttctaatcgtcttatttatttttgagatatttttaaatttcttttctttttttgctaagtattcgcttttattgtctgcaaatactgcttcagttttaagcctacgataggattcccatcttttaggcgaaagttcttgatgagcaatagcttcccagatagcacagcctggttctgaggtgtgagtacaattacgaaaatgacattttccgaaataagcttctatatctgcaaaacttttatctaaaccttctgaaacatcccacattcccaactctctcatacctggtgtgtcaataacaataccaccacctgaaattaaaaatagctctcgtctagtcgtggcatgtcttcctttatcatcatctatgcgaatttcctttgtatttaaaaattctcctcctagcagacaattaattaatgaagattttccaactcctgaagagccaagtaatgcaacagtacagcctgatttgatatacttagaaatctgtttataaccatctggctctatagatgaggtaactactacatctacacccaaggctatagaattaactacttgtaatttacgatgcacattgtcacataagtctgatttagtaagtactactactgggatagctccactttcccatgttaaagacagatacctctccaatctatgaatgttaaaatccttattcagtgacatgcacaaaaaaacaatgtcaatattagctgcaaccacctgttcctcatttacctttccagcagccttacgcacaaacaagctttttctatgaagcacatgatgaataatagcattaccatttttattattgcaacgatccaacataacgaaatcaccaactgtgggaaaatcagattgtatagtagcctcaaaacgcagttttcctgaaacctctgcaaacagtacaccatttacacatacagcttgataaaagttcttttcctgcgagataattcgagcaaggtataaatcgtgatattccatactttgagtaataaaattcctatttagaccatagtcttgtaaattgatttgtttcataccattcattctgtttcctccttttccaacttttcaatgattctttctagtgggaaagggggctgtgccagtggttttaatgcaattgacattaatttcactgaattatcatcagctgcaatacgattagaactaagatgtccacagcgtgtacaacgatgaataattgcccactcaccattttttctcacccacactccaataggttccatattagcatcacaatctgcagcacggtcaccaggaatgatatctacatgaagactatgtaaacaatgtggacaatgatttctatgttgtgtaccagctccttcaggaactacaaggcaaccacaatttttgcaaataaagttatccatacaggaattttcctgataataagctcgttttctatttttataattcatttttatttcctccgtatcttgtattttctacaaaaaaagtccacaggtatttatatctgcctttttatgtggtatacatatttacctacacaaaaacagaaaacccctgtggactagaaaatttagtatcttctatttcaacataattatattcaaaataatactgtgtaaaattaataaaagtgtagcagattaaagcccactacaccacaatttaacaaagtaatatgtaatattattatttgttgtctaatgttagttatctataaaggcagagtaagacacaacaatcaaatgtatcaaaaatacacttaaaaattctgattaaacagaacccatatgcgtctccaactatttatttgttggttaccattatatataactctgacatcaggcaagacactccttcactaataattattattaaaattttatcataaaatataagtatgttcaagtataatttaatatattcatatatttatgtttgtctcattttcttattctataaaatctagtggtattttaaaatttaatgttcacctagtattaataataaaaattaattgctattatttgttttctcattttatgcctattgctcaatttatctcacttaaattaataacaactgtcttttcatacaaaacctacaatcaagtttttccatatattctacatgaatagtctattttttttatataaaataacgttcatatttgtaaatttatttaattttcaaataagtatattgaataataagcaattctattgtattattgtaattgtagaataaaactaaatcggcaaaactagagaaatttagtgacgcaaagctatagggactaacgcttataaaataaactatgagttatgtcagccagttgccaaaaagagatattctttttgtttttatgaaagttttttagggggataataatatatatgtttagagataaaatggatagatgtacacatatgttgactgcttatattggtagttcatatgattattgtgattttatagatacacaactagatgattttatactagagtacggagaaaatgtggtagaatcttgtttgcatcaagtgatggtattagtaagtaagtataattaaatagatttggttttctagagaaccctttttagttttatctactttaaatagccttatgttagaaagctaattaagatagatttctagtattcataattttattttctatttaaaatacatataataaagatgtaaatttgtatcaaataataaatatgagaacttaaattctcttatctatgtgaaaataaacatctcttaaaatgaaattctgtaaacataaatgattttttagtttgaaggattagattaacaaaattataaatttgcaaataagctatattaaaaaatataataattttttatataacttattcttttataacttttaattttaaaagaggagaatgtatataagagtattcaatgtactagaaaaaatcaaaagaaatattagaagaaatggatattgagtaatcaaataaaagattttgatattacaaatgatatgtttcaagaaagcattcctatcacaacaaaaactattcttgaagacatgccttcaaatgatgaattaaatcatgttttttcaaaaggttgtgaacgaaaaatgaaaaagagaaaaattgtattaatcacactactattaataggtgttttgttattaggaagtatcctatataatctttttttagtaaaagcagctaatatttcaatgctaaaggaatcttggaattttgatataccaatacctaacaaagaaattgaagtatttgatactcaagatagtattaatggagatggacaaagttattttattcaaggattttctgaaaagaatttcaaaaaagtttttaatttaaaaggtggtatagttgtaagcaaagataatattaatgaaatagaaaaatatattgataaatttaaaagagattctgttaacattaataaaagtaataaaaataaaattgaagaagattttaaaaaatataagttagaagttaaaaaagatgataagtatatatataagagaaattatgaaaactatgtagttttaattataaaaaaagatgaacaaaaattatacagtttaatatggaatcagtaggtacatatgtattattaagaattataaataataaaaataaattttagtcaatctacaaaaaccttttaaattgtctggaaatcacctcctcatttgttataaaaacatacaacaaatgaagaggtgattttatggtttttaaaaaaataattataagtggatatgtgctttcacatgtttatcaacatttgtaatgcctatatttgctaatgaattataatataaaaatattaaataatattcaactatagattatgtaaattatcctatgaaaaaaataagttgtataaaatctggcaactgtagattgacgatttcttttaaaattacaattataataagttttatagaattaaaaataaaactttagagatttttgataacattgtagactaaatttgccaccgaaattactttacagtggcaaatcggtggcaaatacaatatattattagtatataatctatataaacattactattgcttgattatcttagctacagtttccacatgtgtagaatgagggaacatatctacaggttgtgcctcaacacatttaaatccgtgaacatttagatagtctaaatcccttgctaaagtagaaggattacaagaaacatagacaattctttccggattcattgaaacaatagtctctaataccttttcgtcacatccctttctaggtgggtctacaactactacattggcagtcttaccctctctatacatcttaggtacaatttcctctgcctttccaacataaaattcagcattatgtatattgtttaatttagcatttatcttagcatcttttatggcatcatctataatttctattccataaacctttttagccttttgtgccaaaaataaagatattgtacctatcccacagtaaatatcaaaaacagtatcagtatcatttaaatttgcatattcaagagccttatcatacaatactttagtttggacagggtttacttggaaaaatgataatggtgaaatctcaaacactaagtcacctatataatcgtttatttttccatctccatatataactatattttctcttcctagaatagcattcgtatctttttgatttacatttacaaccaaagtcttaaatccaggtatattttccttaagcactgaagctaattctttaagatatggaagtttgtttccatttgctactaatacaaccattacttctttagttgtaaaacctatttttgttactaaatgcctaatcaaccccgtgtgagtcttttcatcatatatacttaccttataggcccttatatatgtttttattattttaacaattttatcatttatctcatgttgtattacgcatttttctgtcgatattacatcatgagtcttctttttatagaagccaataattggaataccattattcttttgtattggaaattgtgctttatttctatatctatatggattatccattcctatagtgtcatgaacttctacatcctctaacttacctattctcgaaagtacttgtttaacttcatttgttttcatttcaagttgtttattataatctaaatcttgtatctgacaccctccacaatccctaagattgtcactacacactcttttcaccctgaatggagacttttctattatctcaacaatatctccctcagcataatttttctttactttattaatcctaactttaactttatcatgtattaatccgccctctacaaaaactgtaataccattgtactttcctactcctactccgccttgaccaatgtctactatatctacaatatacatctcgtttttcgaaagcataaatcaccctccaatcaatctattatatttaaatctttacaaacttttttctttaaatttatattaaaatattgctattaattaaactatattttttactaagctacaatattttattttaccaaaaaaaaaggagcttataaagccccttagtaaataaatttattatttttcttataaaactctagttgaacctctatataccacgcctcttgatgcatccacagttacaacttctccatcttttactagatttgttatatcagttgcagacacaataactggtatatctaaatttatacctacaatagctgtatgtgatgtcattccaccattctcagttactacagctcctgctttttctatataattgttcatttcagcatcagtagcagtagaaacaagtatgtcgccttcattaaagtctacacaagcatttccattctttattatacgaactttaccttctaccgtttgagtacctacacctataccttgcacgatttcttcgcttattacatgaacctttattaaattagtagttccacttactcctactggtactccagcagttataactactaattccccattatctatataatcagcttgtctagctgcctcaattgccttttctataacttcatctgtatttcctgcaacagaagacttaactggatatactccccatgtaagagctaatttattcatagtcttttcattatttgtagtagctattattggagattttggtctaaatttagataccattctagcagtatatcctgaagaagtagatgttattatagctgatgcatttaaatctactgctgttgtacaagttgcatggcttattgcatctgttacagtaacattgttagtaccattttcctttagtaatctatcataatctaaagtctcttctgttctttttgctattgtagccatcatttttactgcctctacaggatattttccagcagcagtttctccagataacattatcgcatctgttccatcatatatagcattggcaacgtctgtaacttctgctcttgttggtcttggatttcttatcatagaatcaagcatttgagtggcagtaacaactggctttgctaattcattacatttttttatcatcattttttgaactattggcatctcttcagttggtatctcaacacctaagtcacctctagccaccattataccatcagaaacttttaatatttcatctaggttctctacaccttcttggttttctattttagatattatttgtatatcagttgcattattgttctctaatacttctcttattgctagtacatcagatgcctttcttacaaaagaagcagctatataatctattccttgacttattccaaactctatatcacttatatctttaggagttattgctggtaaatttatcttaacaccaggtacatttactcctttatgatttttaactattcctgaattttcaacaacacaaactatatcttctccatttatttcttttactcttaagccaactaaaccatcatctattagtatagaatctcctgatttaacgtcttcagcaagacctttatagcttactgtacacatttctttagtccccataatatctttcatagttatagtgaacttttgcccttcttctaaaaatacctctgggtcttcaaagttacctgttctaatttctggacctttagtatctaataatatagcaactggcttatttaatttttctctaactttctttgccatatcaattctttctttatgttcttcatgcgaaccgtgagaaaagttaaatctacacacatttagaccattttgcataagttgagttaaaatttcctcactttgtgatgctggacctagtgtacaaacaatttttgtcttctttacattatttaacatatttgctcctcctgagatattattccacagatttatttttaatactaaaacttatatagataatatttttgccatctcataagcttctttatcaaatactttcttttgagctaaagcttcacttatttctaaatcaattattttgttttcttttattcctacaactctagctgattttccatctaataataattctactgctcttactccaagtctacttgctagtattctatcagatacagttgggcttcctcctctttggacatgccccaatacagtgactcttaaatctgctcctgactcttttttaagttccttttctaaatcactagcacttccgactccttctgctaaaacgattatactatgtctcttacctcttttttgagtagtctttaatcttagagcaacttcatctactgtaatttctacttctggtactattatagtttccgctcctcctgcaagacctgcatataaagctaaatctccacagtgtcttcccataacttctactatgttaactctttcatgagatgatgatgtatctcttatcttacctatagcatctataatagtattcattgcagtatcaaatcctatagtataatctgtatatgctaaatcgttatctatagttcctggtatgcctatagctgggaatcctaagtcactaagtttttgggctcctgcaaatgaaccatctccaccaattacaactaagcaatcaattttatactttttaagaatttttactgcttttaatctaccttcttctgttttaaattcttcacatctggaagattttaatatagttcctcccctgtgtataatatctccaacagaagataagttcatttcagttaaatcttcttctagtaatcccttatatcctctattgattccatatactttgcatccataatatattgctgatcttacaaccgctctaatcgcagcattcattcctggagcatctcctccacttgttagtaatcctatagttttcattttttacctccttggattttatgtcaattttttattataatcattgttattgtattctaatggactttttttgtccctatatcactttttaatcccatcaagactaaaaaaattaaatgtccttaaatgtccattttgtgatattatatcacaaaacggacaatatttttcatattattataatatatttagatttttatataaaaaatcaagcttttacttttatgttatctttaggaagtaactcttctaagttatttataaattcatcacatatacaagtcaatgccccggtcattttatatgctttacgtttaccatttatattttcatccatagggtacaagtatatactgtcattacctggatattgtttggctatttctacaatattattagttgtatcagtatcagacatactatctattttcaaatacaattttttaccactttctggcttaatattttctacatttctagttcttcctgaattgtagtttctatctgcaaagtcagtatcatcatttatatcttttatctctctagctataagttttgcattttcgccttcttttatacttaatgttccttttacatatattatattatcttcattcaaaatgacattatacttttgtaataattgaggaaaaactattatttctatagcaccatacaaatcttctaattcaataaatgccataatttcatttcgttttgttgttttaatagttttagttacaatcattccacccattataacatctgtttcattcatttgtaggtatgactcttcttcctcttttaatgaatttaattttccattatccatagatgttttttcttgtagttctttttcaaattgtgataaaggatgtccacttacatacattcccaagacttctttttcaaggttaagtctctctctttcttcatactcttgccttttaggtaaactgtatatttgttgaaaatcactatcttcctcactatctccaaaagcatcaaataaagaaatttgaccttgaacatttttctttctatccatagatacactttctaataaactttcataaccagccatcagactagctctattttcacttatattatcaaaagctccacattttattagactttctattactctcttatttgtatctttttggtctaatcttttgactaaatctactaaatctacaaataatccattagattctctttcagcgattatattgtttattatatttacaccaacattttttacagctgctagaccaaatcttatattgtcgccttcaactgaaaactttgaaaaacttttgtttatatctggaggtaatacatctatttctagtgctttacattctcttatatactcaactaccttatcagtatttcccattacactggttatcaatgctgccataaattcaactggataatatgtttttagataagctgtctcatatgctaaaaccccatatgcagctgcatgtgatttattaaatgcatatctagcgaagtctatcatatcatcaaatattttattagctatttcctcttctacaccatttctgatacaccctgcaatttctatattaccatcttcatcaaatttaccatgaataaaatattgtctttcttcttccatcacgtccatctttttcttactcatggctcttctaactaggtcacttcgtccgtaactataaccacctaaatctctaacgacctgcataacctgctcttgatataccaaacaaccatatgtaacttccattataggctttaatttttcatgtagatatgttacatcttttgggttgcttttattttttatatatgcaggtatagaatccattggacctggtctaaatagggatattcccgctacaatatcttcaaaattgtctggttttagctgtttcataaaacttctcatgccagcactctccaattgaaacacccctagtgtatttcctgatgaaagcatttcatatactttcgggtcgtcataatccatctttgaaaagtctattttttctgtgtagttttttataactctatttttttctattaaatcaagagtatctcttataactgtaagagttcttagcccaagaaaatccatctttaaaagcccaagttcttcaagtgttgtcatagtaaactgtgttgtgattgcatcttgatgtttgtacaaaggtacatattcatctacgggattttttgatataacaactcctgctgcatgagtagaagcatgtcttagcattccctctatctgttttgatatatttattatttcttttgtttccgggtcttggtcatacaattctttaagattaggatttgtatctagggccttatctattgtcattcctaaagcaaatggtatttccttggctaccttgtcaactttattgtagcctatatccaatacccttccaacatctcttattgcagcttttgcacccattgttccaaaagttattatctgggctacatggtcatcaccatattttctctttacataatctataacttcttctcttctctcataacaaaaatctatatctatatctggcatggatatacgttctggatttaaaaaacgctcaaataatagagagtactttattgggtctatatcagttatcttaagtgtatatgctactatcgaaccagccgcactacctctacctggtcctactataatattattttctttagaaaaatttataaaatcccaaacaattaaaaaatactctacataacccattttttcaattacatctaattcataatttaatctctctagtatctcattgctaggattatcatatctctcttttaatccattaaaacacaactcccttaaataagtttctggtgtatatccttctggaacatcatacttaggaagatgtatagtattaaaatcaaactccacattacacatatcagctattttcacagtattgtcaatagcctctaatgcgtatggaaataattcttccatttcttctcttgattttaagtaaaactcatcactaccaaatctcattctatttgggtcatttaatgtttttcccatttgaatacacataagaacatcatgtattttcgaatcttctttatttacatagtgaacatcattagtagcaactagtggtataccagtctcttttgataattttactaaaccagagtttacttctttttgctcaggtaaattgtgatcttgaatctccaaaaagaaattttcttctccaaatatgtctctgtagtcaagagcaaattgttttgctttttcataatttctattcattaaagcacgtgctacatctcctgcaaggcatgcagaaagtgctataatccctttgttatgttttttaagttcttccatgtcaactctaggcttatagtaaaaaccttctacgtatgaagttgaaactatttttattaaatttttatatccttccatattcttagctaacagaactaaatgtccttgatatttgtcatagtttgggtctttatctctcaatccacgtgcagctgtatagacttcgcaccctataattggctttattccttcttttatagctgttttgtagaaatctataacaccaaacatacaaccatggtcagttatagctattgagctcatgtttagttccttagccctttttataagttttttcaccctcgaaaacccatcaagtaaactatactcagtatgtacatgaagatgagcaaaatctttgttcattaaatcacctcctgctttataattttaattttaccacaaatatatgtcctaaaacaaaaacagagacttttatctcaaaataggaattaacttcaacatataccattatatgttataaattaatgcttattctgagattgtcccctcaatttattgctatgatttttttttcaaatctgttgcaatttcttctatttttctaagtctatgattgactccagattttcctattggtggttctaacatctctccaagttctttgagagtcatatcctcatactcgattctaatcttagctatctcttgtaaattttctggcaaactgctaattcctatagtctcttgtatgagcttaatattttctacttgtcttactgctgcatttactgttttagaaaggttagctgtctcacaatttactatcctgtttacattatttctcatttcttttactattttagtattttgaagacttaaaagagcgtggtgtcctcctataatactcaacaaatctgatatttgttcactctctttgatataaacaacgtgattattttttctagccacaattttactattaaaacctaaagagtttataagttcttttagagaatctgcaaactcctcattattagttacaaattccatatgatagttcttttctgggtcgcttatagaacctccaccaagaaaagctcctcttatgaaagctctcttacatccttcatgcttaattaagttctctgaaattttgtttatagtaaaaaagccttctttatcttcaagtatacctaacttttttaataacatttctgaacccatttcgcttgttaccattaatacataactgttatttctctttagcatttgattcttatttactgagattgtagtattgatattaaaattcttttttaataatttaaatactttacgggctattgaatttaactctgttgttatctttagatttagcttcttatatccaacgatttgtatacttccccctgatttaactagagctgataattcagctatattacaacattcattcccagatataactcttgctagttcatttttggtttcagttgaaaaagacatatctatcacctattaactaatttttctttaaccttttttttatttcttgtaaggcaacctttattatctccttttcatcatcatacctagctaggtctaccactctatctagatggataaatttagcatcaataaagccttcctctttttgtggaatagtatccatattctttgcttgcatcaaataccaaaaaactgttttatgaactgctctattttcatcccagttttctttgaatgtatagtgtatttcacctaaatatttcaatatatctgcttttactccagtttcttcacttacttcacgtaatgctgcctcttggttattttccccttcttctacttttcccttgggtaacacccaatctccattgaacttccttagtaaaagaatcgtattgccaaacaggactacaccaccagcactaacctcttctctcatcgatgttcactccttaaaactaacataatgataaggatttctacacaattttttaaaatccttttttactaacttttgttgtaattatgatttagggctaactcaataactatgttagatatatactttgcatcatgtcttatataattattttttatttcaattaaattcttctctacggtttttatacccatctcttttaatttatctttttgctttttatctaacaagacttgctctgctccatcttgtttatataagtcaagcatttcttctggcaatatctcattatttgcgattacataatctattaaattctcatcagtgtgctttactatagcattaacatgctctaatacattgtacccttctgtctcacctggttgagtcattatatttgctatatatacttttggagctacagacgatttaatagcgtctacaatcccctctacaagtaaattgggtattatactcgtatataagcttccagggcccataattataatgtcagcatcgtaaatagatgcaataacatcctttaatggtttgacatcttttggatttaaaaaaattttatcaatagagcttttttgaatttttgactcttcaggtatactagattctccatttattatattgccattttctaatttggcaactaaatttacatcttccaaagttactggtaaaactcttcctgttatagcaaaaatttcacttaatttatatacagctttttcaaagtttccatacaacccattcatagcagccaaaaacaaatttccaaaactctgaccttttaaaagcccttctgtaaacctatattgcataacttcattcattgttggctctatatttgcaagtgctaatagacagtttcttatgtctcctggtgggagcattcctaagtcttctctcaatacacctgaacctccaccatcatcagcaacagttacaattgcagttatattttgcgtagtgtgtttaagacctcttaaaaatactgattgaccagtacctccacctatcacaaccacatttggttctctattttcaacaatagacctttgaaatagttttactttttcattttttgcttttttatatataaataacgatacaattaatgcaatccaacctaaaattcctacaataataagtaatttagccatgtttgcctccattatcgcaacatagagtctctatgtttctttacaactctatatcccttattagataaatcctccgctataagatttgttatagtaactgacctatgtcttccacctgtgcatccaacaccaattactagatgttgttttccttcatctatatattgaggtactaaaaaatgaatcatatctaaaagtttcacataaaattcttcactgattttagaattcataacataatctctaacttctttatcatcaccagttttagctcttaactcttcaacataatagggatttggaagaaatcttacatcaaatactaaatctgcatcagcaagtataccatgtttaaatccaaaagatactacagaaatagttaggtttggattatcttcaccagaagaatatattttctttatttcttccttaaggtctttaggtttcatgttagttgtatcaattatacatgtagataactcctttaaaggttccattatctttctttccatttttataccttctggaatctgcatatcttttgccaatggatgatttcttcttgtcattttatatctctttaacaatacatcatcattacagtccaaatataccatttcatattcataattttctttttctaaataatttaagctttcatgaagcgcttcaaaaaactttctccctcttatatctatccctagagcaactttatcaatacttgaatttggttgataacataattctgcaaatttagttatcaaagcaggaggtagattatctacacaataaaatcccatatcctctaaagctctcattgtctcactttttccagatcctgaaagacctgtaactataacaaatttcattgctaactcctcccttttatcttatgtttattatattataatgttttctactaacgatatatccagattagagtcagatatagtcttcatagctagtttaaaatcaccaactctttctggacaatgtgcatctgagcctattataaatttattttctagcccttttattttatttaattgatttacattcaaaaaagaatggctactatttatttcaagtctagtatttgtcttttttgctgtctttgctacttcttctatatacacatcgcctttatctcctggatgagtaattataaaaatatcattattacttatcgcatttattacagcttttgtattgtattcttttgctttttcagttttaaaaatatagttattacaatgatttaataagcttcttaatgatgttggagtagaaccaaaatgatatccagccataatataatcaaaatctctaataaatttatcatccatatctatattgcctttatcatctaatatgttacactccatacctaaaagtatatttatatcattgtacttatcatttaaataatctacttcttctctcattttgagaatatcttttttctttacaccatatgcaatatgtttatagctatggtcagatattcctattgtttttattcctttagaaatggctacctttacattatcttcaatagtccctttgccatgactatataatgtatgtgtatgataatcagccagtattttcatttgttaatcctctccaagtattttgacttcttcttccaacataaccccaaacttggcatatacagcactttttataacatatattaaatccaaaatatctttagcacttgcttctccttgattgactacaaatccacaatgcttctcagatacttgtgctcctcttaaagtaagacctctcaatccagtttcttctattaatttacctgcaaaatatcctgttggtctcttaaatgtacttcctgcactcgcaaaatttaatggctgtttagttattcttcttgtcgctaaatcatccattaaactttttatttcatcataatttccttcttgtaattctagttctgctgataaagctatatatccgtttttcgatattatactttttctatacccaaattccatctgttcatttgataattcaaatatattgccttccatatccatcagtcttactgacttcactatgtccttcatttcaccaccatatgctccagcattcatggctagtgctcctcccaatgtaccaggtattcctgatgcaaactcaaacccttttaattcttgcttttggagagctttacctaaaactgataataaagctcctgactgagcagtcatcctagtatcatttatctcataagaattgaaattatcagctaattctattaccactcctcttattccaccatctttaattaaaatgtttgaaccatttccaattattaaatacggaatagattcttcttttaccaacttaagtacattttttaattgttcttcagttctaggtctaactaatatatctgctggtcctcctaccctaaatgaaatatgttttttcataggttcatcgacttttatatcctctttacttaatatatttaataaatttatatatatatcttgattattcattgtatttcctcccaaattatactgaactttagctgtcattattatttaaattacattagtatatagtattaactatattcaataatatatgattttgcttatcatatggattttatattttaagcttcttaattacaaactatattcaataaatatataataaagtaaaaaaaaaaaaataacaacatataaaagaatataaataatttaaaaaaagcatcaatatcactgatatcaatgctttaaaaggcaatttaattcgtattatttatctaactatttttgacatagcaaagataataaatccctccaactactatggaacctccaacgatatttccaagcgttacaaataccaaattagttataaattgaaccatagttatatttgctcctaatgccattcccattggtataaaaaacatgtttgcaacactatgttggaatccgcataatacaaataacattattactgtccaacatgaagccaattttgacattatatcttgagatgctgtagccatccatacagctaaaacgactaaaatattacaaagtattgcttttaaaaacattgatgctatagttgaattaaccttagcttctgccacagctatagcttttgtagctgcatctcctgtcaatgtagaagaataaaacacaagtgcaactagcagaattgaacctactaaatttgcaaaataaaccagtccccagtttcttaacatttttcctaatgttatttttttgtccataagtgcaatagccattaaggtgtttccagtgaataattctgctcctgccaccactacaagcataagacctactggaaagaccatagcacttaaaaagctagctacccctgggtctatcttgccaaaagtttgactaactatcatactccccaatgccccaaaacctataaatgctcctccaaataaacctaatagaattgcattttgtgtcgaaatgtttgcttttttaatgcctgcacttatagttgcttgtgcagtttccccaggtgtcaagaatcctttactcataaatccttcccccttaaaaattatactttcccttgtctttttatggcaataattatataataacaatatgatatataataaattttattaacataaaaaatatactatatacttatatatacttgtctcatataattatactatttattatataacaactttgttaatttcgaaataatttatattgaatttgaaaaatttaccttttgattatttattttactttttaattattgaggtattatatataatagatatatgtttgtgttattatatataattacttattttaataaatatttgaaggagggaattttatgtttgatatatcatttttcgaaatgtcaatatatgaaatagcagttactacaatatatataattaatttcatggttatactaaaccttatctttagagaaaaaagaaacataaatacaactttaacatggcttcttatattagtattgattcctgctcttggattcatactttatatagcttttggcagaaatatttcaaaaaacaatatgtttagattgaaagaaaaggatgataagataatcaaaagtaatatactagatactcaggttaaactccaatctacatctgaaattgattcagatatacatcaacataaggatatgatttatgcattggctaattcaaataatgctcattataccaataataacgatgtgtggatttatgctgaatctagtcaattttttaacagtcttcttgaagaacttaaaaaagctaaaaaatatataaacatacaattttacattttcaaagatgacaaaatcggaactgaaataatagacattcttatagacaaagctaaagaaggtgttgaagtaagacttttatttgatgcagttggtggtagaacactaaaaaatagtacactttccagacttaaagaaagtggtgttaaagttggaagcttcttcccatcattcttgaaaattgtaaactttaacttaaactatagaaatcaccgaaaaattgttgtcattgatggtaaggtaggatttgtaggtggatataatgttggtgatgaatatttaggtagaaatccaaaatttggtctatggagagatacacatactaagcttactggtgattgcgtaattgacctaaatatgagattcatccttgattggagatatacaactaaagaagatttagatttagaaaagtactttatagaagaagatacaaattctaatcatccttctgaaaatattgggattcagatagtatcaagtggtccagatatatcagaacttgatgagattaaatatggttaccttaaaatgattcagaaagctagaaagtatatatacatacagagtccttatttaatacttgactcaacttttatagatactttaaaaatagcttgtttatctggtgttgatgtgagagttatgattccttctaaacctgaccatccctttgtatactgggcatcatattcatatgctggagaacttttaaagtttggagctaaaatctacacttatggtcaaaatgcatttttacatgctaagacaatagttatagatgactctatatgctctataggaacagctaatatggatatcagaagttttgagcttaatttcgaagttaatgcatttatgtactcttcaaaaaaagcattggaacaaagaattatatttgaaaatgatattttaaattctaaggaaataacattagatatatataattctaggtctacttatataaaaatcaaggaatcaatttcaagactattatcagcagttttataaatcttttattttataaaaattttacattttggtttattttttaaagttttttatatgtattattttttttttattgaatttagctcattttttttattttttttaactattctgaattattttatattataatagactagtatagtttttatttttaataggtaacttttttgcattgtttttataaataaagaaattgttgtatattattctttctttattgttctggttttgttcacccacataatgttggggtcaactcatggttaattattttatgaaaaataataactttaaaaagaaaagggggatttgttatgtgcgattttatttcacacaacaagcaattatttgacgaactagatatatttattgactctcttacaacaaaggaaggtgcgttaatacaagttctacatgaagcccaaggtatatttggatatcttccaaaagaagttcaacttcatgttgctagaaaacttggagtagctcctgcaaaggtatatggggttgttacattctattcttattttactacagaacctgtaggtaagtataaaatcagtgtctgtctaggaactgtatgttttgtaaaaggtgctgacaaaatcttaagtgcttttgaaaaacagcttggcataaaagttggagaaactactagtgattttaaattttctttagagggtttaagatgtttgggggcatgtggtttagctccagttgttactgtaaatggtaaagtttatggtaaagtgaaacctgaccaagtaagcgaaatattagatacttatagagaattagaattgaattgttaagaggggtgaataaataatgcgtaaagtaaattcatttgatgaattaaaagttttagctgatgagctgaaacctaatcttagcttaagaaaaaattattctaaggaaaatgtattaagaagagaattacttgtttgttgtgatactggatgtacctcttcaaacagtctagaaatagttagtgaattagaaaatgaaataaagaaatcaggaatccaagataaagttagtgttcgtttgacaggttgttttggtttctgtgctcaaggtcctattgtaaaagtttatcctgataacgttttctacgtaaaagttgagccatctgatgctgaaaagatagttcaaagccacttaattagaaatacagttgtcgaggaattattatatgaggaagaatctttaagtaaaaaagttgaagaacaagaagaaatgtctttctacaaaaaacagttacgtatagctttaaaaaattgtggtcttatagacccagatagtatagaagaatatattgccaatgatggttatttagctctaggcaaatgtttaacttctcttactcctcaagaagttattgcagaggtaaaaacttctggccttcgtggtagaggtggtgcaggtttccctactggctctaaatgggaagctgcttcaaaaaatccagctggtccaacagataaaaagtttgttgtatgtaatgctgatgaaggtgacccaggtgcatttatggatcgatctgtacttgaaggtgaccctcatagtgtactagaagctatggcaatatgtggatacgctataggttctgatacaggatacatatacataagagcagaatatccaaaatctatagaaagattaaaagtagccatagctcaagctgaaaaatacggtttacttggcgaaaatatcttaggcactggatttaactttaaattagaattaaaatatggtgcaggtgctttcgtttgtggtgaaggtacagcgctaatgcattcaattgaaggtagacgtggtgaacctagaatgaaaacttatagttcttctaagagtggtctatggaaatctcctacttgcttaaataacgttgagacttttgctaacatacctgcaattatacttaagggtggagattggtttgccaacttaggtactgaagattctagtggtactaaagtctttgctcttggtggaaaagtagaaaatgtaggacttgttgaagttccaatgggtactactttaagagatattgtatttgaaattggtgggggaatccctgaaggtaagaaatttaaggctgttcaaacaggtggaccatctggtggatgtataccaactgaacatttagacactcctatagactttggttcattaagttctatcggttcaatgatgggctctggtggtatgcttgttcttgatgaatctgactgtatggtagatatagccaagttcttccttgagtttactgttgaagaatcttgtggtaaatgtacaccttgtcgtataggtactacaagattattagaaatattaactaaaattacagaaggtaatggtactctacaagatttagatgacctagaaaaccttgctgaaactatacaaactgcttcattatgtggtcttggtaaagctgctccaaaccctgttttaagtactcttcaatatttcaaagatgagtatatagctcatgttgtagataagaaatgtcctgctggtaaatgtcagaacttactttcttactttataacagatgactgtaagggttgtacaaaatgttctagagtgtgtcctgctggttgtataacaggttctgttaaggaacaacatacaatagatacttctaagtgtctaaaatgtggtgcttgtatagataattgtacatttaacgctataatcaagaaataacttatttggaggaggaataacaatgagtttagttaatttaactattaatggcaaacacgtttcagcacctagtggaacttctatcttagatgctgcgaaattaataaatataaaaatacacaacctttgtcatttacatatgaacgaaatagataagcttgacacttgtgcttcttgtcgtatttgtatggttgagacagagagaggcttagttccagcttgtggaacagttataaaggaaggtatgaaagttcagactaatagtgctaaagcattaaatgctcgtagaactattgttgaattattgttatcagaccatccacaagattgttttgtctgtgaaaaaaatggagattgtgaattacagactatagctgctgatttaggagtaagaaaaataagatatcaaggttccaaatcttttgcaggtaaagatacttctactaaatctttagttaaagaccattctaagtgtatattatgtagaagatgtgagactgtatgtaatgacatacaaacagtaggagcattatctggagttaatcgtggatttaatactttagttagtacattctttaactctgatatggttgaaacagagtgtacattctgtggtcaatgtatatctgtctgtccaactggagcattaacagaagtagataatgtacctaaactttgggatgttttaaataaaaaagaaaagactatagtagtgcaagttgctcctgctgtaagagttgctattggtgaagagtttggattagaaccagggtcaatctctacaggaaaaatggtagctgctttaaaagcacttggatttgaacatgtatttgatacaaactttggtgcagattttactataatggaagaagctactgaatttatagaaagaatccaaaaaggtgaaaatcttcctatattaacaagttgttgtcctgcatgggtaaacttcttagaacacaattatccagacaagttaaacttagcatctagctgtaagtctcctcaaggtatgtttggttctatagctaaaaactactatgcacctaaaatattaggaatcaatcctgaagaactttatgttgtatctgtaatgccttgtgtggctaaaaaatatgaagcttcaagagaagaattaagtgaatctggaatactagatgttgacctttctataactactagagagttagctaaaatgataaaagaagctgctatcgatttacctaatcttcaagaccaagattttgataatcctctaggaaaatctacaggtgctgcatctatatttggagcaagtggtggagttttagaagctgccctacgtacttcatatgagaagataactaataagactttagataatgtaaacttcactaatgttagaggtcttaaaggaattagggaagcaagtatagatgttgatggaactacagttaatgtgtgtattgtaaatacacttaaaaatgctagaaagattatggataaggtcagaagtggagaatgtaaataccatatcatagaagttatggcatgtcctggtggatgtgttggaggtgctggtcaaccttatcaccatggtaatactgaaatagttgatagacgtgcaaatgcgttatatgaaatagatagaaataaggctattcgtaaatctcatgagaatcctgatttacaagctatttataaagacttctttggagaaccaaatagtgatgtagcccataaataccttcatactcattactttgataagagttgtgtctatggagagtgtccacaagaatgtgcttgtgaagaagctaagtagtcataacaaagtataaaatttattcttaaaaaaggattgtcttaaaatacttttacgtaatttaagacaatccttattaatttcacaaattaaattatatttctaaatagacttattctttaattaacctatctattaattaaagaatacctgccattctcataagttgttttgcatttgtagttttacatcttccatcttttatcttatagtcaaaatgaattttatcgtctacatagtactctgagaaatgatagtttacaacttcaacatctccactacctgaaaggtcacatagctcaaagtcatgtgttgtcaccatacttataacccagggttttgataatttctttactgcctcacttgctccaataattctatcagcagagttagttcccttaaaaatttcatctactagaaccaacattggcagttcttttaaactatattgaatcattgattttattctaagaatctcagcatagaaagttgatattccttgacttacatcatcttgtattctcatagaagtaaatatagccatacaggtcgcatcaaaactcttagcgcatactggagcacctgcatatgccagcactaagtttacaccgatacttcttaaaaatgttgtctttccagacatatttgaacctgtgataatacaagtctgagaatttaattgtatcgaatttgctatgacacttttttctgctattaatgggtggtatacctcttcaactttcaatcttggagtatcttcatattttattactggaaaacatgtattttcctttacatgagaaataactgttaaacttattagagcttcaaattctccaatagattcaaaccaatctctaatttgatttccatatatacctttccatcgctccaaagcttctgcacaatgatagttccacatcaaaacaccacaggcaattatatatagtatctgattataccttaggtttacagcatttcctattgaatttaattgtttaacacctcttgaaactccacttcccttagaaagtttatcttgtaattctttcaaatatgcactctcaaacgtctctttttctaaaacctcaaacattttttcatatacttgtatacttctactaaatgaaaataatggagaaagagtttgcataagtcttggatatccaaaaccactaaaccctaactggattataaaaagtaaaaaaacaggtaaaacaggtaaaaatcctaacatacaaaatataaaagataagattgttgcagttggtagaccccaagtaaaaatatgcatccattttggtatatacacattcttattttctccatactctataaacgattctatactactatctgaattatttttttgctctttaccaattatattactgagtatttgaatatgaatagaaaaatcatcttttgataaaagttcttttatagccctctgtctttctaagattacattctcatctggattttcattccacaaatatttggctaaaaaatttttcccataagatgtattagctacacagatatattgatacaatgatgctcttccaaataagtctaaatcttttgcttgcgaattttcatcttttaagtattctttaccatctattttaaattccttccaaccatctccaaatctcttaatatacttatttaatacttcgctcttacttttaaaatatgtttcttcttcttttactttactatgaataactaagagtgctataaatattattattgataaaactccaacaaaaatacctactatatttttattgtaaaatccaatagcaaaccctgctatcactatcaaaaaagatattaatcttgctgtacttatgttatttgactttttacttaagagcaattctttttcagtactactttctaaaagtttactaaaatattctattcccataaaaaattccaactttcttgttatataatgaaactcaaatataaaattaatctagtattattataatctaacactgtactttaaattatccttatataatatatcttattaataaacattatatatatacaacttgattttaatttataaggtgtaggacataatcctaatcaatatttaattaaatgatgtgtagttcactattattcagtactacttagtatcgattaattttgataattttttagtaaattcttgagctgcatcgtatcccattcctctttgtctaaaattcattgctgctacttctaatatcatagcagtatttcttccaggtttaacaggtacaactaatttctctacattaacaccaagtatttcttcgtattctttatccagtcctagtctatcataatacttagtttcatcccaagcttctaaatgaactactaaatctatcattttagaatttttgattgcccctactccatataaacttctaacatctattattcctattcctcttatctcaagaaaatgtcttattagttcaggtgactgacccacaagcatactttcatctaattttcttatttctacagcatcatctgcaactaatctattacccctttgaatcagttctaatgctgtttccgactttcctatactactttcaccttttatcagtacacctataccataaatatctactagcaccccgtgaattgttgtgtgtggtgctaacttattatccaaatagtttgacagtctatttataagtctagtggtatttctatttgtgctcaaaagtattcttttatattttttagccttttcaattacatctggcttgatttccaagtctctagaaattattaacgctggtatttcatatgagaaaaatctatctagtacttcttctcgaatatgactatccattaatccaaaaaaattatattctgtctttccaactatttgtattctttcatatgcaaaataatcaaaatatcctgcaaactgtaatcctggtctatttatatcttgagagtagacataataatctacatcatcaggcatgtatactacttttaacttcaactcttttattatctctcttattgatactttattgctagtttccattaattttcttcctttctaaaaaaattataaacattatctgcaatgcttttattcattccatctacttctaaaagttcttccatagtagctttttttatagcctctacatctttaaagtgatttaataatgatttctttcttttttcacctattccttgtatatcatctaagatagattttgtcaaagctttatttcttagacttctatgatatgttattgcataattatgaacttcttcttgtatactagcaataaatctatataaattagttgttttatctagttctatttctttttctttgcatatcaatcctttagttctatgcttatcatctttgtacattccccaaagaggtatatctacatcattgagttctagtactttttttactgcactaacttgtccttttccaccatccaacaatatcaagtcaggtaaatttccatgttttaatcttctatctacaatttcagccatagaatcataatcattaggtccaataactgtctttattttatatctcctatattccttcttatcttttttagcattcgtatacactaccatagaaccaatcgaatctacaccttgtatatttgatatatcataagcctctattcttattggcaacttttctagatttaatatttgttttaattcttccaatgctccaatacttttttcatattttcttttattcatatcagaaaatttttcaagatattctacagcatttttcctaaccatttcaactaagcttttcttctctcccttttgaggaactcttattgttactttttgcccctttttagatgacagccattcttctaatatagaactatcttctatctcatcttctataattaattctttaggtatatactcttgttcattataaaattgttttacaaatgaacttaatatagaagctcttggactatccattacaccttctaatataaaatgttccctacctacaatcttaccatttcttataaaaaatacctggacacaagcttcattatgagctcttgccattgcaaccacatcttggtttaagtcacttacagtagcatctattttttgtttctgtatcatctcttcaaggctctttatcttatccctatatacagcagcctcttcaaatctaaagttcatagaactctcattcattttttcctttaaaagttccatcaatttttcttctttaccagataaacacattataatctcttctatcatttttccatactcttctttagaaacatttcctgtacaaggtcctaaacatttatttatgtgtagatttaaacaaggtcttgtcttattctttattgctttatctatatctattttacagcttcttattggatacgtactacttataagctccaaggtatcattcacagcagttatattggtatagggtccaaaatactttgccttatctttaagaactcttctaacttttaagattcttggataatcttcattcgtagttacttttatatatggataagttttatcatctctaagcactacattatactttggtctgtatctttttattaaattacattcaagtattaatgcctctaactctgaatccgttataatatactcaaacttatatatattcttaaccatagattttactttagatgtatggttttttgaagattgaaaatactgccttaccctattttttagagatatggcttttcccacatatattatatggtcgtatttgtctttcattaaatatactccgggctcagaaggtaatttttttaaatgctcttgtatatcaaacatctcgccctccaaaacattaaattttatactaaaattataccctaaaatatgaattttaaaaagttatacaatttccagtgctttagacaagttaaagtccatattcccttctataattgatttgaaaacaattttaaccatgaagagtaatatggactttactttgtattactatttacaacttatatttgactaatttacttataacaaaacagtttatcgtatatctgctctaaaatttttcacaatttatataacttaagaaaaatatttctttaagaattgacctgtataagaaccatcaactttagatacttcttttggtgttccagttgcaactatagttccacccttatctccgccttctggtcctaagtctattacataatcacaagtctttataacatctaaattatgttctatgactataattgtatttcctgtatctgctagtctttgtaatacttggattagcttgtctacatctgccatatgaagtccagtagtaggttcatctaatatatacaaagtctttcctgttggtcttttactaagttcagcagctaattttatacgttgcgcttctcctcctgataattgagttgaaggctgtcctaatttaatatatgaaagtcctacatccattaaagtttctaattttctttttatatttggtatattttcgaaaaactcaacagcttcttccacattcatatctaatatatcagatatagttttatctttgtattttacttgcaatgtttctctattgtatctttcacctttacaaatttcacaaggaacatatacatctggtaagaaatgcatttctatttttattattccatcacccttacaagcttcacatctaccaccttttacattaaaactaaatctaccttttttataacctcttgctttagcttcattagtagatgcaaaaatatctcttataaaatcaaatacacctgtataagtagcaggatttgaacgaggtgttcttccaataggactttggtctatatttataactttatctatactttcaattccttttatctccttatgcttaccagctctttgcttaagtctattcactttacttgcaacacctttgtaaagtatatcgtttattaatgtactttttccagaacctgaaacacctgttatgcatgtaaacttacctaatgggaactttacatcaatatttttcagattattttctgatgctttaactatttctataaaacttccatttccttctctagtagtctcaggaagcaatatttgttttttaccacttaaatattgacccgttattgagttctcattttcaattatttcatctaaagtaccctgtgcaactatttcaccaccatgtatacctgcacctggaccaatgtctataacataatcagcttctctcattgtgtcttcatcatgctctacaacgattaaggtatttcctaaatctgttagatgtctaagagtagttataagcctatcattatctctttggtgaagccctatacttggctcatcaagtacatataaaactccaaccaatgcagaacctatttgagtagctaatcttatacgttgcgcttctcctcctgataaagttccagcttttcttgataaatttaaataatcaagacctacatctcttaagaacatagctcttccttttatctcttttataatctcatgagctataaatctctgtttttctgtaagatttatattttccataaagtcaatcaattcatttacagataagtttgtaacttccattatattttttccatcaactaaaacagataaaacttcctttttaagtctcatccctttacactttggacatggtctctctgccatgtattcttcaatcttatctctcatgtaatctgaattagtttctctatatcttctctctaagtttactattacaccttcaaagtatgatttataatttctagttcctccaaattttgactcataagtaaactctacaattatattatctttaccataaagtaattcctccacaaaatcatctggtaaatctttaaacggtgttgtcaaagatacattaaaatgctctgctaaactttttatcattttactgtaataagtgtcatcattaacacctgttgaaccccatgctgccactgcaccttgttttattgataaatctttgtttggtactactaattctgggtcaacttctttactttccccaagaccattacaaacatcacaagcaccaaagggagcattaaatgaaaacatccttggagataattcttctatgccaattccatgttctgggcatgcaaatttagttgaaaaaagaatttcttctccatctattatttgggctattacaagaccatcagatagcttaactgcagtttcaattgaatctgctagtcttgattctattccatctttaattactattctgtccactacaacttctatattatgtttttgatttttatttaagattatatcatcactaacttcatagttctcaccattaactctaactcttacaaatccttcttttttgatattatcaaagacttttttatgtgtacctttttgtcctctaacaattggtgaaagaatttgtaatttcgttctatctggaaaatctagcattttatcaactatttcttgaatagtcatctgacttattttttcaccacatgtagggcaatacacatctcctactcttgcaaataatagtctcaaataatcatatatttctgttactgttccaaccgtagaacgtgggttttttgaggtagtcttctggtcaattgagatagctggtgataaaccctctatatattctacatttggcttttccatctgacctaaaaattgtcttgcataagcagatagactttctacatatcttctctgcccttctgcatatattgtatcaaatgccaaagaagacttcccagaccctgacaaacctgtaaaaacaataaatttatctcttggtaattctaaatctatattttttaaattatgttcttttgctcctcttattataattttatcttccataatgttgtttttacctttctatttttccaatttttcttctaattgtttcactttatctctaagttctgctgctctttcaaattgtaagttttgagcagcttccatcatctctgattttaatttatctatattagctcttatttcgtctttatcatctgtatcagatattccatatacaacttcttcctctgcaaccttagtagcttctatactatctcttatatttttctgtatagttttaggaattatattgtgctcttcattatataaattttgtatatctcttcttctctttgtttcatcaatagcattttgcattgagtcagttatcctgtctgcatacataattactcttccattttcatttctagctgcacgtccaatagtctgtattaaagctgtttcggaacgtaagaaaccttctttgtctgcatctaaaattgctataagtgaaacttctggtatatccaatccttctctaagtaagtttattcctacaaggacatcaaacttccctaatcttaaatctcttattatttctgttctttctaatgtaactatatctgagtgtaaatatttaacttttatccctatttctttaagatagttagtcaagtcctcactcatttttttagttaaagtggttataagcactctttcatttttttctatagttttagttatttctcctaccaaatcatctatttgattatttataggtcttacttctacaattgggtctaaaaggccagttggtcttattatctgttctgctattgtctctgagtgttgaatttcataaggtcctggtgtagcacttacaaacaacatttgatttatatttccttcaaattcttgaaaatttaatggtctattgtcaagtgcagaaggtaatctaaaaccattctctataagtgatgtttttctagacctgtctcctgcatacatacctcttacttgtggtatagtgacatgtgcctcatctacaattatcaaataatcatctgggaagaaatccattaaagtatatggtctttctccttctgaccttcctgtaatatgtctagaatagttctctatcccctgacaaaatcctatttcctttaacatttctatatcatacttagttctttgttcaattctttgtgcttctaatagcctatcattttccttgaaaaatttaatttgttcttgaagctcgttttctatttctacaattgccttttcaattctttctggcgttgttacatagtgagatgctgggaatataacaacatgatttctagtaccaacaatcttccctgttacataatcaatttctgttattctatctacctcatcaccaaaaaattctattcttattgctttttcatcattactagctgggaatatttctagtatatctcctctaactctaaaggtacctcgtgtaaagtttatgtcatttctttcgtattgtatctctattaacctttttattacatcatctctgtctctttgcatacctggtcttatagataacataagttctttatagtcttttgggtcaccaagtccatatatacaagatacagatgatattattatagtatctcttctctctaaaatagatgctgtagcagaatgtcgaagtttatctatttcatcatttatgcttgcatctttttctatataagtgtcactgtgagctacatatgcttctggttgataataatcatagtaacttacaaagtattcaactgcattgtctgggaaaaattctttaaactcactgtaaagttgtgctgctagagttttattatgagccattattagggtaggtttcttaacttgttgaatgatatttgccattgtgaatgtttttcctgaacccgttacacctaataatgtcgaaaatttctcatttctatttatagaatccactattgatttaatagcttctggttggtcacctgtaggtttgaagtctgattttattttaaaatccatagtatcactccttttttcgaacattagttcctgacatgtattattatatcatacctttataaaattgtttaagttattttaaatattttacccatttaaattttacttaaatctaaaacataaaaaaagacttctatctttgcaatagaagtctataattcatggaaaataaatactttattcaacttacataataaaatcaaatgcttctttttcaactccatctaattttaaatcaaacatttttaatatagttgctgcatgtgctctcaggtctccttcttctataaccacaccacctttaatatttggtccaaaagctataaatggaggtctattacctttagtaggtaaatgaccatgtgtcgcaacagcaaacttgtaatcttttatatctgaatcttttataatacttccttcgaaatcatttccaaatgaaattccttcaagaccttcaatcaccatttcaaaatcaccttcaagaccaaggttagatgcttcctctttggtaaaaatattctctatgaataattcttctttaaattcttcaagcagttctcttaattctgttaacctatctaagttatttactattatttgagctgatattccagaagaatttacataggcatcaaaatccttaacttctccattttcaacttttataaatccatttgatttaagcaagacatttggatttataactttatcaactctaagatgaccatggtccccaagtattataaaatttgtatctttgtatgtacctgcatcctttgtagcctgaataatatctcctagccatttatcattcatttttaatgctttatctacttcgtcattaaataagccataattatgtcgtgtatggtccaatgtagctaaatgtattagcattaaatctggtttatattcctttattatatctactgaacagtttactccaaataaatccatgttgggttctaatttccaatcaatataatgacaatgtctattgtaaataccgtccattataaccttactggagcttcgttcaaaagtttctcttgggtcatcttctctactaggagcccatatttctgcaatattataatctatatttggatttgctcccattacaggccataatacactagaggtagttagattattttcttttgctacatctataatagtttttacttttatgtcctttgaataccagtaccagtctttattttctttatttgggtcaaatttttcattatgatatataccatgttttttaggatatactcctgtaaccatactagtatgacacggatatgtcagagtgggataaacacaatttatattttttactatggagcaattttctagtatagatttaaagtttggtagattttttacaaattccaagtctttttcaaataaagaatctactgataatactataacctttgtcatttacattacctcttcatttatatattattgaatacttttaatcaacttacaagtctatataattatttatttgttttatctattactgcttgcattgcagaagttcctttgcttactacatcttttggatttgcatttaaatcagtaagcccctttttaatctcatccattagcttatcagttgcttccttgtatccatttaacattggaagtgcaacagcatattgtaattggtcagttgcaaccttatattgaggtttttctttatataatgtttgtaacttttctgagtttgttgcatcttcagttgttggtaagtatcctgttgatgaactaaactgaacgattttatctgtttgtgtcatccattctataaattctgcacttgcttctttttctttatctgttccaccttcaagcataactagattagctccacctgtaggagttgcgtatttttgattttttggtaggaatgctgttgatatttcaaacttaccttctgtttgttgcataagtcctgctaaatctgctgttgatgtaaatatcatacctactttaccatttacaaaatcttgttttgctacgtcccaggcattataatcttctccaggaggcattttcattattccagctttcatcatatcttgccagaatttaactggtgcttgtcctgcctcattattaaatgctacttttttaccattagttatttctcctccactttgcattaccatagcttcatagaaccaaatatctattggtgtttcaaaaccataagtatcttctgatttatttgtcattttactagcgtaatccttaagctcttcccatgattttggacctgaagggtcaagacctgctttagttgccatatctctatttatgtataatattggtgtacttctattaaatggcataccaacaaacttatcctcataatatgaatttgttaaaagaccagaaaagaatctttcttgatatgttttatcaaaatatttactcatatctactaaagcacctgctgatgcgaatgtacctgtttgagttatttctaataatgttacatctggttggtctttagatgttaaggctgcctgtagttttgttgcattttcatagtaatctttctgttttaacatatttacttgtacatccttatgttcactattaaattggtcaaccattttttgagcagtttctccattagttccacctaaaggagcccagaaatctatcttcgtaatattgctatcagtcttttctcctttagatgcatttgcatcattagaatttgaacacccaactaaagaacctaataataatgttattgctaatcctgttgctaattttcttttaagcttcattttcatcctccaaatttagtctttaattttttattttattcctgaatacataaaagcttcttttacttttttattcgcaaatatataaacaagaattattggtaaaattagaattatatttcctgccattattacattccatgcagtaattccttctgaagatttaaggagcgcaactcctattggtaaagttcttattgcatctgtatttgtcattactaagggccagaaataattattccaatggtatataaaattaaataatataaatgttattactgctggttttgccataggaaccattattctaaacattatttttaagtcagaagcattatctagtttagctgcttcaatagtttcatctgaaatctgcataaaattctgtctaagcagaaatatcccaaatgaagatgtcataaatggaattataagtggaatataagtatttataaatccaaacttactcatcatcatatagactggtagaaaagttacttgtggtggaatcataagtcctacaagcaaaagcccaaataacattttttcacctttaaatttaatcttagaaaatgcatatgctgctggaaccataactaaaaattgtaaaattaaaacacttcctgttacaaatacactgtttagtaaatatctaaaaaatggacctgaatgccatgctgtactataattttctaacactatatcatttggtataatagtaggtggtaattgcatcatttcttgtggatttttaaaggatgtcgatagcatccatataaaagggaatataaatattgcagataaaagtaatagaattaatatttccattgattttgatgctattttttttatatcaactttgtcttttttgataggttgtataatatccattgtctcctccttttggataaatcttataatatctactttttctttattgataatgaactttctttgataagagtctaaagttagcatatgtagcaatcataactatagctaacaaaaacatactcgctgcactcgcttgccctatgtcatagtatataaatccagactcatatatataataagataacatgttagttgaacccactggcccaccttgtgtcattatacttatctcatcaaatacttgaaaagatgcagttgttgttgttatcataagaaaaaatattgttggtgataatagcggcaatgtcactttaaagaaattcgttattttgtttgcattatctaatttagatgcttcatatatatagtttggtatggatttaagacctgataatactattaagatattgtatccaagagtcttccatattcctattagaattagtgacattaaagctgaactttcacttgaaagccactttgatgttggtaaatgtaatgtcgatagtatccagtttaaaaagccatattgtggctccataatccaaagccacaatacagctacagatactagtgaaattacatgtggtgtaaagattatactttgcgttaaattgtgtattatagaatttttatttagccaaacagcaagtactatggctagtgatatagatatagtcaccataaaaaaagtataaattgcagtgttcgttatagtttgtataaactctggattctttaaaagttctgtataattgtttaagcctacattttcaaaggttgaactaagaagactaccagatttgaagcttagagatatcgtcttaattattggatagactataaacaataaagttcctataatagcaggtgttatatataaatatgctttattaaattgctttttcataaatatctcctttaattttagaatacatacttttacatacttttacatcttctattctttctccatttttatcaaaataatataaatctttttctaatacacttattcttaaagttcttccaatatcaaatatatcattttccgttttgactcttatttctctattaagaacagataaacaatatatagtttcatttcccaacacttctttagtcacaacttttccaaataggctaaatacatcatcattttttccatctatgtttatactctctagtgttgctttttctggtctgaatccaaatttaatatcattttttatatctagtatgttcatacaaggactccctataaattgagctacaaataaattcttaggattttgatatatcttctttggagaacctatttgcattatctttcctttgttcattataactatcttatctgccattgacattgcctcaacctggtcatgagttacataaacaaatgtagattttagtttttgatgtaattgtattaattctgttctcatttgatttcttaatttagcatctaaatttgacaatggttcatccattaaaaatacctttggatttttaaccatagctctagcaagtgccactctttgtctttgacctccagataagttgcctggtttcacatttaaatattctctcaatcctactacatcaataacttctgttataagtttttctcttttttctttttctacttttttgtttttaagaccaaattctatgttttctctaacagtcatatgtggatataatgcataattttgaaataccatagctatatcccttttactagcatccgtttttgtaacgtcattttcttcaatttttaacttgcctgaagttatatcttcaagacctgcaatcattcttaatgtagtagatttaccacatccacttggacctaccaatactgtaaaagaaccatcttctatagtaagatttaaattttctataactgtattttttttattataagattttgttacattttctagtcttatatctgccatttttatcctcccaaaatatttaatttaattctacgatttacttatagattaataatactcttaatttgtaaaggatatattaagacaaagtgaatatatagtaaacttattaaaataaaggttaaattataaacattttttgttaaatatactgaagttaagatgatatacagcttatgttagctataattttctatatttttcatattcatggtttgctatcacaatgtgattttaatttatgaagagtcatataaaactatttattttttatataatttggtttgaaaataaaaaagacctctatgggggatagaggtctttaagtgggggagattgagtaatttatttttgctatattaagttttacaattatattatgtcccaaatttacaaggtttaaacataaaaaataaaacttttttaatttttataaatttacccaaaaaaaattacgtggctacgtcctactctcccaggcagtttcccaccaagtaccatcagcgctagagagcttaacttctgtgttcggaatgggaacaggtgtatcctctctgctattgtaaccacataatctttatgcttaatatttctattaagtttttaataagtttatagaacctagtaatactagtttctttagagttaacactctaaaaactacacatatatcttaatcaatgaacatcaaataaatattggtcaagtcctcgacctattagtatcgataagctaaatacattgctgcacttacaccttcgacctatcaaccagatagtctttctggggtcttacccttgcggtgggaaatcttatcttgaagttggcttcgcgcttagatgctttcagcgcttatccattccgtacatagctacccagccatgcccttggcaggacaactggtacaccagaggtacgtccatcccggtcctctcgtactaaggacaggtcttctcaaatttcctacgcctgcgacggatagggaccgaactgtctcacgacgttctgaacccagctcgcgtaccactttaatgggcgaacagcccaacccttgggacctactacagccccaggatgtgatgagccgacatcgaggtgccaaacctccccgtcgatgtggactcttgggggagataagcctgttatccccagggtagcttttatccgttgagcgatggcccttccacgcagaaccaccggatcactaagtccgattttcatccttgctcgacctgtatgtcttgcaatcaagctctcttttgcctttacactctacgtacgatttccgaccgtactgagagaacctttgagcgcctccgttaccttttgggaggcgaccgccccagtcaaactgcccacctgacagtgtcccaagaccagattcatggcctatggttagagtcccagtactacaagggtggtatcccaaggatggctccgccaaaactggcgtcctggtttcaaagcctcccacctatcctgtacatgtagtaccaagacccaatgtcaagctacagtaaagctccatggggtctttccgtcctgtcgcaggtatccggcatcttcaccggaattacaatttcaccgagtctgttgttgagacagtgcccaaatcgttacgcctttcgtgcgggtcggaacttacccgacaaggaatttcgctaccttaggaccgttatagttacggccgccgtttactggggcttaagttcactgcttcgattgctctaacagatccccttaaccttccagcaccgggcaggcgtcagctcctatacatcgtcttgcgacttagcagaaacctatgtttttggtaaacagtcgcttgggcctattctctgcggccacctgatggtggcaccccttatccctaagttacggggtcattttgccgagttccttaacaacagttctctcgctggccttaggatactctcctcacccacctgtgtcggtttgcggtacgggtacctttaacctcgatagagacttttcttgacagtgtgaaatcagctacttcgctactaaatttcgctccccatcacatcccagcattatcaaagcggatttgcctactttgactgcctcaatgcttgggcacacataaccaacagtgtgcttagcttatcctactgtgtcatcccttctctcaaacggttatcggtagtacaggaatatcaacctgttgtccatcacctacgcctttcggcctcagcttaggtcccgactaacccagggcggacgaaccttcccctggaaaccttgggtttacggcctgtgggattctcacccacatctcgctactcatgccaacattctcactcccatactgtccacatgtccttacggtcatgcttcaacccgtatgggaagctcccctacccatcattactgatgccgtagcttcggtagtaagttttagccccggaaatcttcggcgcaggatcactcgaccagtgagctattacgcactctttgaatgagtggctgcttctaagccaacatcctggttgtctgtgcaatcccacatcctttaccacttaacttacatttagggaccttagctgacgatctgggctgttgccctttcgactatgaatcttatcacccacagtctgactcccaagtataagatgacggcattcggagtttgatagtcttcggtaggtgcaataccccctaggacattcagtgctctacctccgtatctctcaccttgaggctagccctaaagctatttcggggagaaccagctatctccgggctcgattggaatttcaccgctacccacaagtcatccccgagcttttcaacgctcgtgggttcggacctccacgaaattttactttcgcttcatcctgctcatgggtaggtcgcccggtttcgggtctacgtcaagtaactgaacgctcagttaaaactcgctttcgctacggctccgcaccttaagtgcttaaccttgctacttaacgtaactcgttggcccgttctacaaaaagtacgcggtcacacaagaaatgtgcttccacagcttgtaagtgcagggtttcaggttctatttcactcccctcccggggttcttttcacctttccctcacggtactatacgctatcggtcactaggtagtatttagccttggagggtggtccctcctgcttcccacagggtttcacgtgtcccgtggtactctggatcatatctgaagtcttctcgtttaacatacaggactattaccttctgtggtgggtctttccaaacctcttcaattacgatacctcttcgttatgatatgtccgcaaccccaataaagaaaactttattggtttgggctaatccgcgttcgctcgccgctacttacggaatcgaatttctttctcttccttcaggtacttagatgtttcagttccctgagttcccctcattaagctatgtattcacttaatgatacttagacattactctaagtgagtttcctcattcggaaatcttcggatcaaagtttacgtgcaactccccgaagcttatcgcagcttatcacgtccttcatcggctcctagtgccaaggcatccgccctgcacccttaataacttgaccagttaaaaaggtttgatagattagaagctatcaacttcgataattttaaaaagttatcagctttatatattacaaattagatgtcatatcactaaatatatatatgcagttttcaaagtgctaaagcacggcgccaacggataaatcccgttgcttaaagtgctaacgcacaacgccaacaaacaaacttcacatgcgttcagtttattctgttgctaaaagtgctaattttgagtattcgtaaaaacgaaccctcaaaattaaacagtaggtaattctccttagaaaggaggtgatccagccgcaccttccgatacggctaccttgttacgacttcaccccagttattgattccaccttcgacgacttcttccaaaaggttagataatcggcttcgggcgtctccaactcccgtggtgtgacgggcggtgtgtacaagacccgggaacgcattcaccgcagcattctgatctgcgattactagtaactccagcttcatgtaggcgagtttcagcctacaatccgaactgagagtagctttaagggattagctccaccttacggcttggcaaccctctgtactacccattgtagcacgtgtgtagccctaagcataaggggcatgatgatttgacgtcatccccaccttcctccaggttatccctggcagtctctctagagtgcccaacttaatgatggcaactaaagacaagggttgcgctcgttgcgggacttaacccaacatctcacgacacgagctgacgacaaccatgcaccacctgtcaccaatgtccccgaagggaactctccgattaaggagatgtcattgggatgtcaagcttaggtaaggttcttcgcgttgcttcgaattaaaccacatgctccgctacttgtgcgggtccccgtcaattcctttgagtttcactcttgcgagcgtacttcccaggcggagtacttaatgcgttagctgcggcaccgaagggggtaacccccgacacctagtactcatcgtttacagcgtggactaccagggtatctaatcctgtttgctccccacgctttcgtgcctcagcgtcagttacagtccagagagccgccttcgcaactggtgttcctcctaatatctacgcatttcaccgctacactaggaattccactctcctctcctgcactcaagtctcccagtttcaagagcttactacggttgagccgtagcctttcactcctgacttgaaagaccgcctacgcaccctttacgcccagtaaatccggataacgctagccccctacgtattaccgcggctgctggcacgtagttagccggggcttcctcctcaagtaccgtcattatcttccttgaggacagagttttacgacccgaaggccttcatcactcacgcggcgttgctgcatcaggctttcgcccattgtgcaatattccccactgctgcctcccgtaggagtttggaccgtgtctcagttccaatgtggccgatcaccctctcaggtcggctactgatcgtcgccttggtaagccgttaccttaccaactagctaatcagacgcgggtccatcctgtactggctcacctttgatattcaagagatgcctctcaaatatattatcccgtattagcatacctttcggtatgttatccgtgtgtacagggtaggttacccacgcgttactcacccgtccgccgctctttaccgaagtaaatcgctcaacttgcatgtgttaggcacgccgccagcgttcatcctgagccaggatcaaactctcaaataaaagtttatcaggctcagatactattgttatcaaaatatctggctttatggtttgtttcttgttttataaattaacctactgtttaattttcaaagttcattttttatgtttgcccttttcttaaggacaagtaacactatatcatcttaaaaataatccgtcaacacctttttaacattttttattttattttttatatatcaaacttcttaagttcttctaggtcaagtgttaccaacatattaagcacatcttttcttttacttttatcttcgtatttttttataaccttttttcttatatctcctaatacatttaaatactcctcataatcttcagtatatctctcttcaatttctttttttatctttgatgataatgaaggactcttgcccccagtagacacacttataagtaaatctcctctttttatatatgatggaacagtaaagttcgatatttctatattatcaactacattcactagcttattttttgctctacaatataatcctatttccatatttaactctctattatttgtggcagcaattattacagaagcatcttttatatatatttctttataatcatcttttattatttttatatttccttttaaatcataaaatttatttaaaatttgtttagaaactatagtaacatttttgttaaactctaaaaaatttttacatttcctatatgcaacttctccaccaccaattataactacatctaactcatctaattttaaattaataggatatagcatcttctacctccaaattttatttagttacataaataaagtatagaaattgtaaattagtttctattattcttcaataaatgtctaaacaaaactactgtataatagttaattacaattcctatactttttgatattctttatactactagaatttattttttcaacagtttagcaatgtctttagcaaaataagttattattatatctgctcctgctctttttatagatgtaattgattcaagaattacatcttcatttaataaaccttccttcacagcaaacttaagcatagagtattctccacttacattataagctgctagaggtaagtcaaaattatctttaactcttcttataatatctaaatatgataatgcaggtttaaccataagtatatctgcaccttccaatatatcaagttcagtctctattatagcttcattgctatttgctgggtccatttgatatgtttttctatctccaaaagatggtgctgaatgagctgcctctctaaaaggtccataataatttgaagcatacttaacactataagccatgattccaacattttctaatccattttcatctaaagcttctcttattgcttgtattcttccatccatcatatcagatggagcaaccatatcagctcctgctttagcatggcttacagatattttagccaaatactccaatgatttatcattatcaacataaccagtatcagttaaaatcccacaatgtccatgacttgtatattggcacatacagacatctgttattacatttatatctgaatttatttcttttacctttctaattgccttttgaactattccattatcattaaaagcttgtgaagcacactcatctttttcatctggaacaccaaataacattatatgttcaattcccaactcacttatttcttttatttcgtcttctagcatgtctattgataaatgatatacatctggtaaagaattgatttcttcttttatattttccccctctactacaaacagtggatatattaaatcttctacattcaccttagtttctcttaccaaatttctgattgctttacttgctcttagtcttcttggtcttcttaacatattcaagcctccaaaattaattttttataattaaatctactaacgaatctatagtagatgtagcagattctttgtacaattttattcccaaactatttattgtctctgtagttataggacctatagatagtgtttttattttttctaatattttaatattttcttttcctataatttcaacaagattatttactgttgaggaactagtaaatgttatataatctatatcattagaatttaaaatatctaatatctcaccttttttatcctcatctattactgttctatatatatgtacttctgttacttcacaaatagccttaagtttgtcaaccagataatctctagcattttctgctctaggtataagtatattatcgttatcatttaaaataggagctaactcttcatacagtgactctgctacaaatttttttggtactatatccgctataattcctctttttttcaactcatttgatgtagcagaacctatagcacatacctttaaattagataatatccttaaatcaaaattcatttcatatatcttttcaaagaagatttctacggcatttttactagttagtattaaataattatacttatttatattttttatttcattttctaagttaatattattttgtattttttctaccttaatagtaggtatttctataggatttccacctaaatccattattttttctaccaatacactattttgatttctagacctagttacagcaatactttttccaaataaaggcttactttcaaagaagttcaacttttctctaagtcctacaacactcccaactactataagagttggcggttttacttcttctttaatagcagtttcataaacattctcaagtgtagatgtaacaactctttgattatatctagttgcccaacttataagagcaacaggtgtatccttatcttttccttctttcattaagttttcacttattttctctaggtttgaaattcccatcaaaaacacaagagtacctttgttatttgcaagagcattccagtttaattctccactatcatcacccttcaaatgacctgttattacatgaaatgacgaagcatggtctctatgtgttataggaatacccgcataacataaacctcctatagcagaagttatacctggaactacttcaaattctatatcttcatctactaaagtctctgcttcttctccccctctgccaaatacataagggtctcctcctttaagacgagttacaatttttccttctttagctttttctgctataattctatttatatcttcttgtggcaaaatatgattacttgatgccttgcctacatatataagttcacaatcaggcttagcttctcttaaataactactatttgctaatctatcatatactattacatccgattttcttatacactctaaaccttttaaagtcatgagtttataatcacctggtcctgcccctactaagtaaaccttacccttcataattctcatactccttcaatacaagtttagctaactttaaacctaactctctaggagaagaaatatctccatctatagacttgattactactttttttccttctgaatctccatataagccagtaagatgtattttatcttggattatttcacaataagctgccattggaatatgacaacttccatttacaccatctaaaaaacctctttcagccaatatttggatttctgtattctcatccttcagtgaatttactattccctctatcgtactatcattgcttctaatttctatagctaaagctccttgggcaggtgctggaataacaacatcaacaggtaaataagaacttattttatcttgcaaattagctctaattattcctgatgctgccaacacaataccatgcatgttttcatcttttatttttcgtatcctagtttccacattacctctaacttgtactatatttaaatcaggtctttgtttcaataattgaaacttccttcttttacttcctgttcctattactgctccatgaggcaaatcatctaaatttttatatccttctctaagtattagaacatctcttgggtcttctctcttaggcgtatgagcaaattttagtccatctgctaaataagaaggcatatctttcatactatgtactgctatgtctatttttccatctaataattgttgctctatttctttgacaaacaatcctttatcacctattttatccagtgaaacattttgaattaaatctccttttgtctttatgattttaatctcaaaactaatttctggatacttcttttttaattcatttattacccactctgtttgtataagcgctagagtactacccctagttccaaccactatattcatattaagtctcctttaaatattgctttcacctattttattttattatctttatttactagtatagtagaaaaataagatatcttatcttcaaggtgcgcttcttttaaatctgtaaacacattttcgctttcttgggaagaattacttactaaaatagcatgttctattaaatcatacttttctaatttttttattatttctttaaaatttttatataccttcatcaatactattgaattataattttgcaaagcatactctatcttatcatcttccatagtacaaggaattaccactaaagcttctttatccatgactaatggaaaattctgattagatgctatattggaaaatgatgaaattcctggtatagtttcgacttctacctctcctaatattcttttcattatatatacatatgtactataaatcatagggtctcctaatgtaacaaatcctacatttttaccatcattaacatctgatataatttcttgtgctacattgtcccaagctaaacttttttcattcccatcaaaactcattgggaaatgcctagactttatttccactgattcaggtaaatattcactaactattgataaagctagactatctccacccttttttgattctggagtgtatagaatatccagtttctttaaagtattaaccgcttttatcgtaagtaaagaaccatctcctggccctgctcctataccatagaacttagcattctctgcacattttacagcatgacgaacaaatttatcttgtatataagaattttctcctagtccttttaaatgaactcttacgtcaaatccatcttcttctaatattgttttccaagaatcttcttcatctcctgccatatcatttatagcatggtctcctgcaactaacataaatggcatcaaatttacagtttttatatttccttcttttaatcttcttattacatgttctatttctggatacccttcaactgtaccaacataagcatttattccattatccctaagcatgtattccaatgctggatacgctgaatgtgattcatgaagtgttccatgtcccataaatactactgcttcattactttccatatgaggaatttgatgcttaattgcctctacagcttcctgataatcttcaatatgtgtaagcaaaggtcttcctaatacaatctttttgaatttagaagaatatccatctacttgttcttttaatttgttaaattcttcgccacatataatatgaagtgtttggattattacttcatcatatccttgttcatatattttatctaaagcctgtattggattatctatttctattccatcccttttttttattttatttattatcatatttgatgtataagctctaaaaaaatcatggctttttaacgaattttttattttatcttcacatatatctattgtcttttctctcgtttcatgatagcttgtaccaaaactcactactaataaggctttcttcatatattctcctcctaaaaattacacaagtatgtctttaattttatttatgtcattaaatacattttcgtagttaatcgattctctttttataattattactggtatattgaaagttttacatgcatttaccttctctaagaacccaccagctattccactttcttttgttatgactaaatctatattgtaatgtttatatgtttcttcatttatatactggctaaatggacctttcatagctactatattatctgcacttaaacctaatttttcacaacttaatatgacttcactcgttggaagaactctaacaactaaatttttatcacttatttcctctataaatctgttcaaatttttacttcctgttcctatgaatatatttgtccctattttatttgctatttcacaggcttcttcaattgtatctactataaatttattatcataatctatttcttcaattaaagattttctctcaaaccttatataatctatattcaataattttgcacaagtaatagcagttttggatacttcaactgcataaggatgagtggcatctattatttttactatattattatcttttataaattttagcatatcttcttttccaagcttacctaaaattacattctctgcatgttgttgtgcaagttcccttccataatctgtagtaactgaaaggatatatggttgatttttcagttcatttatcttatcacatatagataaactatctgaagttcctcctaaaattaaaatcatactgtataacctcttggagttatcatcaattcaccattaatataggtagacttatttcctattataaccattgtagtcatatcgactttttcaaagtccatattttcaaaagtacatacaaacttttcttctttttctctacctacatcttttaccactccaacaggtgtatctccacctttaaactcacccattattttaaatgctttgcttagatgttcacttcttcccttacttcttggattatacaaacaaattacaaaatcggcttcagcagccaatctcaatcttttttcaattacttcccacggagtcattaaatcactcaaacttatatgacagaaatcatgcataataggagctccaagtatagctgctgcaccaatacttgcagtaacacctggaattacctttacttttatatcttcatcttctttagatattaattctaaaatgagacctgccatcccatatattccagcatcaccactgcttacaactgctactttttttccttttttcgcttcctctactgcttgtttacatctatcaacttcttgcctcataccattttggattatttctttaccttgtataaattcttctattagttttatataagtcttatatccaacaatagcctcagaatcttctattgcttttattgcttctaaagtcattgtatctttacttcctggtccaattcctacaacgtatatcatatttttattctccccactgaaaaagttattcctttatatttatgtttttcaactaacaaattacctttgctcaaaagatatgctataggttctgctactgaatacacgcccacattttttttaacaaaatcagatttatcaaaaagattatcaaccttagatatttcatctattgaaaatgttttaaatggcacttttagtatttttgataattcaattattgctttttcgtcttttttcagttctatacttccaactgtgtttattgctctaatatctatattttgtttattaagaaactcttcaagtgaattatacatcagctcactatctgtgtttcttctacagccaattcctatcactatatctcttggaattacctttattatttttttagtactatagcaatgttcaaatttattatctaagtttaaattctcaatatcttcaatacaatttattttattgcttactacaactaatttttctatatatgtgtttgaaaagctatctcttaactcatccttactttctataagtttaaatcccctagtatcaacttgatatccttcatcaacatataatccaacacatttattattcactagcatagaatttacttcttttacactttctctaaaattatcaatatgtgcatttagtttttttgctatcatatctaaggaagctttttgatttatatcagtagctgttgttattactggattagcatcaataagactacttatgtactgtgtcaagctgtttgcccctccaatatgaccactcaataaacttattacgtttttgcctttttcatccattaccaaaattgcagggtcactaaacttacttattatgtatggtgctatacttcgtacaactatacctgtagccattataaatattatgtaatcaaatttgctaaatatttctcctacaaaatcacttaacttcttttgaactgtatgtacacatgtttcttcaacaactaaattactttttttattttttacttgatatataacacagttatttactagagaatttatctttacagctaaattttttccattttctgtaatacagattatagcaatattaccctctatattcatgtttgaaatccttatcatataactttgaattattatactcttctcctaaaaatctcccaaccattattaaagcagtcttatttatgttgttttctttaacttttacagctatatcacttaaagttcctttaactattttttcatctgcccaagttgctttgtatataactgctataggagtatcttttggatatccaccttccagtaatttagacacaactttctcaatttcttgaacagataaaaatattaccatagatgtctgatgcttagcatatgattgtattgattctttctctggaaccggagttctgccttccattcttgttataattacactttgagaaatttctggaactgtatattcaacccctaaagatgatgctgcccctaaaaaagaacttactccaggagtacagtcataatctatattcaatttatttaaatcttccacttgttctctaattgaaccatatatagaaaaatcacctgtttgcagtcttacaacagatttattattttctataccttctctcataacatctattatctcttgtaaatccatatgtgcactattatgtatttggcaatcttctttacagtattccaaaagttcaggattaacaagtgaacctgcatatatcactacatctgcattacttaataatttgtatccttttaatgttatcagctctttatctccaggtcctgctcctacaaaatgtactttattcatcatcattttcccctttttcacaagatattatatatataggatttagtggtttaaaatattcaccttttcctagtttctctagtttagaaacattcaaaacacatacatctatttctttaaatccatgctttttaagcagttttaaagtttgattaaatgtatctattattataaaattagctacaagtcttcctcctgtaacgagattttttttagaccattctattatttcttccagattatttcctgttcccccaagaaaaatagactcaactttaacatttaaccctagattaattggagcatatccttttatcacttctatattttttaagttgaatttttttatatttttctctataagctctatagcgtcatcatttttctctatagatataacctttaaattaggataattatatgcagcttcaacacttacacttcctgtaccagcccctatgtctatgaggtttttagcatttactaaatttaacttacttattgatattgctctaacctcttccttagtaattggaactttacctgttataaattcactattcctcatctaaaatcaccacaacattcatatcaaaattgtccattcttattatctcttctggtttcgctattgttattttttcattgtcatatgacagattttctcctacaacaataattttatttagatttctatctattatttctctacttatttgttttggtcctatctttgaatctgtaaccatacatacttttttatgtgataatatgtaatcaaaatctggtattttgccatgactacttgtaatatatacatcattcatatctacatatatttttgaaaatatgtactgtaatgaactaatcccagaaaccacgtttaacatcttattatcaatatttttagatagatatctacctatcccatatattaatgggtccccagatgctattattgatatttgcttttctttattgttatttatgtactctataatttctcttaaattagaatccagaactattttttctccttcaaaattttttatagactctagatttcttttaccaccaattaatacatcagaagtggaaattaaattttcacctttttttgttatatagtctaagttaccaggtcctagacctattatgtttatcatataaagacctccactaaatcatctgtattatccgatttacctaataaagacttatccattgaaaatatgattacttccacatcaatatcatctgaatcttcattcaagtattgctttactctctccttacatttattacttaatatattatatacttctctatattcactattatttattagctctacagcttcttcagtagttacgcattgatttattttatttaaaaattcgtatctagctcccattaaagctaagtttgccactaatatctcacttctagcatctgctaccttactatgagtattaaaaataccagcagatacttttataaatttacctatatgacctgccattaagatttttttatatcctattctttgagcttctttaatcatatagcctataaaattacttaccctaactacatacttaatatctaagtttaatttttctcttataaactgttctccatgatttcctggaaccaatattattttatctaagccttgttcttttttcatctgaagttctatagaaagagacttcttccaaccctcatcactcataggttcaacaatcccagttgtacctattatagatattcctccaactatacctaatcttggattaaatgttttttttgctacagtttctccttgtggagcaaagattgttatttttaaaactttatcatttccaagtatagattcaaaattatctcctataagctttcttatttcatggtttatcattttaagtggagtcggatttatagcaggtttaccaacatccacactaagcccttttttcgtaaccacaccaataccagttccgccataaaccctaataaacttatagagctcacttttacactcactattggtgcttaaactatctatatcctttagagtaagataccctttgttcttatcatttttagctacaatttcagctcttgcataaatatccatggtatgagttgcatctatatcatctccaccatctttttttatggaacattccacaaatgtatcagaaatatttatattatcaacttttagtagtaatggtatccccttaggagtatctatatttatagtattgattctattttttgtaatcaacatatatacagcagccttagatgcacctgttgcacatgaacctgtagtatatcctcttctatatttttttccatctatatatacatattcttccatataggtacctacatagtatataatatagcatttactattgctgctgctaaattactgccaccttttctacctttagaaattatatatggtatatctgttttttcaacttcatcttttgattcttgtgctcctacaaaacctacaggaactcctataactgcatctaaatctaatctaccttctgatttcatctccataactttatataaagctgttggagcattacctaaaacgaatatttttcttccttcttctttagctgcaatttctactgctgccatagaacgagtaattcctttttctttagctaattttacagtttcatcatctgccactaaacatttatacttacatcctaatgattctaactttcttttatttataccactaagagccatatttgtatcagtataaatacttgcattattttttaatgcatctattatactatcaactgcttcttctgatatttttaatatatctaagtaatcaaaatcagcagtagtatgtatagctctttttattattttttcttcaatattattcttaaatttataatctggtctaatttcgtctattatttcttgtatcaattcaaaacttttttcttctattttcataggattctttatgtattccattctatttcccccttaattcctccattaattatgttttgtgtataaattttattatagacagaatttatgttagattcacataaggtatctatcatctttttatcattcatagacttatcaattaaaatacctactacagttccactgtgagcaatatttactccatatgctccatatttttttgatatttttattatttcatttaaatactcttttttttctatattctcatttgctaagctactcaaagtacaagcctctccaactagagataaattattttttttcaatccttcttctaaaagagcaaatgatttttttattacttctttattttctacttttaatttattataatcttgcctcaatctaattttcatagtatctagtactttgtttggttcaagtattataactttcgcattggtcagatttcctaggtattttataacagttccatttagaggattaaatatactatttttatctataaatatagaatctgttggttctatttctgctgctaatttagaaatctcctcactacttaaatctttatctatcaatgataatgttgcctttattgtagctcctatatcagcagttgaacttgccattccttttccaacaggtattttactatttatatttaaagaaatatttttagtatattttttaggtaaattaaatttttcaaataccttttcaattgctaaccttgacttatatctccctaaatttatatctactaatttttcttcaatatacacttcagaatacatatctattgcatatgaacataaatattcttcatcatcaattataccttgtacaaattctccacaagatgctgggcatattccataagatttcattttaatcacccaataaatttttcatattttctataagaattttgttatcttcatgagattttatagccactcttataaaactatcatctaatcctataaaattagacgcatctctaactaatatgtttccttgcttaagcaaatcttttttcaattctttagttgtttttttatatgctcttatcaaaataaaattagcatctgtatcatagacctttatatttcttatgtttctcaactcttgtaacatatattttctttcttctatgtaatattctttactatttttaatatactctttatcttcaaaaataaaattggatagtatatctgcaaaagaattaatagtccatggctctttgtgttcataaattttgttcataatttcagtgttgcttgtaagaccatatcctagccttaaaccaggcataccaaaaaacttagtcacagctttaattataaatatatttttatttgattctatatatttaaccaaactgtatttactttcatcttcaacaaattccatgaaagtttcatcaattattagtaccttattatgtttacctagtaaatgaacaagttcctttaaatcttggacattaccactaggattattaggattacatataaataaactatcaaatctttttatattttcttttattatatctatattaagtttaaagttattttctaaatctagctctaaatctataatatctaaattatttaactcagcacttcttctatactctgaaaaagtcggatttattatagccaatttttttttaacactcttcataagcaaataaatcacttctgttgcaccatttccaggtattataaagtctggatttatacctatatattttgatatattttctctcaagtttgtataatttatatctggataattcctacactcttctaatccttttaaaatgtatctctctaaatttggtaatacatttggatttatgtttgaactaaaatcaattatttcttttgggtttttcccatataatcttgccatttcacctacattggcaccatgccctaaatccttcatctatgtcccccttaagttagcaaacaataatttatataattaagttaattaaaatcatcctacataacacatgtattagtgtaaataccaacatagatacaaatgaagatacatacataattttattagttttaattatatcttctttatctatctccctaagcttatcccctattgttggcttatatactttttccccaaaataaacgttggtacctcctagttgtattcctagagcaccagatactgcgccttctgaaaaagcacaatttggacttttatgattctttctatctctaatagagattttaaaacagttcctatagttataatttaaaaagaaacttccaattgtcataagaataacagatattctagctggtatataattggctatatcatcaatcttagcagatgcaaaaccaatatctttatactttttatttttatatccaactgttgagtctaatgtatttatagctttataggccatagcaagtggtgctcctccaataaatgcataaaacataggcgcaattataccatctacagtattttctgcaacagtttctacagttgctcttattatttcaggttcacttaaattagtagtatccctacctactatataagatagctgaatcctagatttttctatatcttcggtttttaatacattataaatttttaatgcttcgtcttttaaacattttgtggctagtgttgtataaattataaaactattcactacaatactcaataatatattaaaactaaatagcttcactatagcataagttgttaaatatgttattccaacggttataaaccataatataaatcccccaaattttaactgcctatcatttttagagacctttcttattataccttgagtaaaatttataagtttaccaataaatctcactggatgaggaaaagaatatgggtctcctacaattaagtctgtcacatatcctatataaatagataaaatactcatttattcatttccttttttcaaaaaattttctatacaatttaagttattataaaaatgagtatgaagatatgtagccaaagtgtttcctttactataaccaccatcccactcttctactatatttccatctctttcttttctcattgaatatacacatttttcatcactttcaaatattgaatgatgaaactcatgccctttaatagattccccttttttagataaaagagtattttccttggctacaccaatacagtacccaaatctctttaaagaagatgtcatcttactaattccactaaatattccaaccatattaaattcttgttcttcttgattcaatagtttctcacctaggtacatcagtcctccacattctgcataaataggtatattattgttatgtgcttctaatatggaagttctcattgactcatttgcttctaattcttttccaaatatttctggaaaacctcctccaatataaatataatctgcatttggcactgatgcatcttcaagagggctaaaatagtttatttctaaaccaagttcctctaaaagctctatattttctctataataaaaattgaatgctttatcatatgctatagctattgatttattattaacatgttcttttattttattattttctatcaaagtttgaaaatcaaaatcactctcaaattcatcgctttctgatatttcaattattctgtcaatatctatatagtgttcaatttcatctgctaaggtataaaatttttcccttagtgatttcatttctacactaggaactaatcctagatgtcgagattctaaagagaatttgttatttggaggaaaataccccaatacttcaacattacaatatttttctatagaactcttaattatttgataatggctattagtctttacattatttactataacaccctttatatttacatctttatctaattccttatatccaagtaccatagcagcactagatgctgccatagatttaccatttataactaatataacaggtgactttaatacctttgaagtatgtgaacttgtacaattatctaaatctattccaaaaccatcatataagcccataacaccttctattactgaaatatctgcatcttttgaggacttatttactatatactttattttttcatcatctaacatataagaatctaaatttctagaatgtcttccagttataaaagtgtgatatgaagggtctatatagtctggccctactttatatggctgtactttcatatttctcttaaccaaagcttgcattattcctaatgatattgttgttttacctactccactattagtaccagcaattaaaatttttttcataatacacctcctacctaaattataaataaaggtcatcattatttcataatctcatatattttctctatatctaaatgttctcttaaaaaatcagccaacttatcatactctttatccttaaattcattaaaagagtttactttgctttctaattctcctaaaccttttttctttcttatattgtttaaaattgctcttgtaaagcttatttcatcaaatattccatgaagataagtcccaattacattcccctctttatttacacttccttcagtataattcacttctttatcaagttttttagttattaaatctaaacttcttacatcattacctcgctttgtaatgcccatatgaatttcataaccttttactttttttcccttaaggttattcatgtattcactgatacattcaacaatagtagcctctacttgtgttgtagtcttttctttctcaaacgttgtttctgtatctaaaagacctattccatcaacttcttcaatttcactttcaacatgataagggtcttttaattttttacctaacatttggtatccaccacatatcccaaatatcaatttaccttgactatgtaaatttttgatttgcgattcaagaccactttttcttatatatgttaaatcgtctatagtacttttagttccaggtattattaatatatctggatttcctaaagattctccatagtctacatatctaatacttacatcttcttgtgtctcaaatatattaaaatctgtaaaatttgacatatgtggggttctaattatttctatgtgtatatcacttttattcatttttttcttaaatctcgtagttacactgtcttcatcttctatttttatatctgtataaggtactactcctataacaggtacttttatgatgtcttctagcatctttacaccatcttgtaaaagctctttttttcctctgaatttattgattattacaccttttactcttcttttctcatcttcatttaataaaagcattgttcctgctaatgaggcaaatacgcctcctctatcaatatctccgactattattacaggtgcatcagctatttctgccatacccatattagagatatctctatcttttaagtttatctctgcattacttcctgccccttccataactacaatatcataccttgaatttaagctattaaatgtttccttcaacacacctactaactccaatttataatcatgatacttagaagaaggcatttctcctacaactttacctcttacaataacttgacttttattattcccagaaggttttaataaaactggattcatatcagctattggctctattttcgcagcctctgcttgaaatacttgtgctcttcccatttctaatccttctttagttataaaagaatttaaagccatattttgtgacttaaaaggagcaacagtataaccatcttgcttaaatattctacacaaacctgctactaagacacttttacctacatttgaagctgttccttgtagcattatttttttccccactttccatccctccttgttaaaatttactaaaaaacaaattaaaaaaagtcctaatacttctaaagataggacttttatatatattaattaaaaatctttcaccccgaagacctcttgttttaaattaaattaggcaggtatcctggcttaacttcatcctacttctataaccttcccatcaaactgacagtggtatttatagtttcgttggtttcacagtagcgggggctgcaaaggcatctaacctttttcccttttaacatctaattaagaacctaattttaatctaatattctattttcattgctaattttacagatatattacaaacacagattgtaatgtttggttttgattaaattatatgaagtctgtaaaattcattttatctattacagcaaatccaccatcaatttctaaaactgtaatagatgcattatcaattttaaagttccagtgatacttataactaccagaaatcaaatgtgttattatatttcttattgttcctgcatgagaacatataagtattgtctttgtatctaaattactatcattttctaaaattatattatcaatttcttttgccactcttttataagagtctatcaaactttctccatttggatatctatagttgttaccttcttttatcattttttcaaactcatttggatatttgattttaatttcttcaaaagttcttccttcaaagtctccaaaactaatttctcttaaagcttctttttcttctatttctaataatttcaattttgatattttttctactgtatctttagtacgtgtagatggtgttgtataaaccttatctatgttttcattactcagatatctggtaattttatttatttgtagtttgccctcttcactaatacaactatttatatggcctgataatcttccttttttattatcatttgtcagtgcatgtcttattaatattaatcttatcatattatcaccactttttactttaaaaaaacataaaaattaacaaatatatgtaaattaaatatacaagctctgaaagttctattccacagcctaatatatctcctgttactccgtcaatttttttataaatatgttttttgaataatattataaatacaaaaaccactataatcgaacctaatactttaatcaacactatattaggtaataaaaatataaatttagtaataagagcaactatcaataatgtgtatattatagcagttattaacatacttgtagttaattttcctataaataaatttcccattcctttttctcttggtgtcacggttttatatgtcaataacattactcctaaccttgcaatcattggcataaaaattataatccacaatgaattattacttattatatcgtaaacgaatccaacctttaataaaagtacaaacataattgctagaagtgaatttgtacctaatcttgaatctttcattatttcaagcattttttctttatccctataactatatattgcatcaaatgtatctcctaatccatctatatgaagtcctccagtaattaagacaccagctagagttattattatagaagctataaatggttcaaataaaagcatagaaatccatcctattaaataggataatatacctatgacaaaacctacaagtggaaaatatactattgacttataaaattcatcatcaaatcctacatttaattttataggtatccttgtcaaaaactgtagtattaaaataaatcttttcataattgcatactactcctttatcttcatagctatgccactaactacaaaataaacttcattacttttcgaagctatatattgatttatacgacctacaatatcagcataaattctactaagtttattcccaggaacaattcccatacctaactcattcgttacaaatacaaagtatagatttgttttttctatttcttcaataagtttgacaacttgttcttttatgtattgttctaatttgtttatttcttcttgactagactcttctatatttagattgtgttcaaacattagattatttactaataatgttacacaatctagtataacagtttcatgttctttatatatctccttaattatggaatatatatcttcatatatttcataagtattccagtttctaggtctattctcttgatgtttttttactctatctttcatttcatcatcaaatggaatagaggttgctatataagctgtattattatttctgtcaaaacatagtttttctgcaaagttactcttccctgacctagctcctcctgttactagaataattttactcatcaaaacactcctacatattaaatttttatatttatcttcccatgtcaatttcatcaaaagttgccatatttttgtaagtatagtttgaagcttctattatatcaaatgctaaagcagctccacttccctcacctaatctcatatccatatttaatagagggtctaattttaatatgtctaatgctcttttagttcctgattctgctgataaatgagatgctatcatatattctctagtttttggatttatcttatatgcaattaatgctgctgcataagaaataaacccatcaattactactggaatcctattagcactacaacctaatataacacctgccattgagcctatttcaaatcctcctactttagataaaatatctactccatcagttggatttggattattaatttcaatagcctttctaattacttcagccttatgctttagtctttctttcttaagacctgcacctataccagtaacttctaacgggtcacaccctgaaattacagatattattgctgtacttggagtagtatttgctatacccatctccccaataccaataaccttataatctttttctatacactgctctgctatttcaatacctatctctaaacatctaatggcttcttgtttactcatagctggaccttttgccatatttgatgtcccttttcttatcttgtagtctaataccccatccagtttttcatcacagtttattcctacatctacagctacaacatctgcccctacaaatttacttattactccaactccacatagacctttcgaaaaatttggaaactgtaattttgttatattttgagggtcaggtgctacgccttcttcatatacaccatggtctcccgcaaaagcaattataacctttttacttgtgtcaaaattttcattgccaaatattcctgccaattgcatgcaaatatcttctatctttcctaagcttccagttggatgtataagcctatccaatctctgctttgttttttcaatagaagagttatctagggaatatatgttttttgatatactttctaataaactcattttttatcctcccaacatttttttattttttaaactctctttttagataaaaaatactcttattttctaaaaatttcaactttttctttttatttttacatacatataaaaattattctacattttatgttcatttcctttattttacattgtcaatttgcatacaattagatgctttttgtaaaaatatatttaaaagaactttaaggagatgatattgtggatgatttttctaagttaaaaagtttgtatgaagatggatatagatgtatttatcatgattgtgttgataataattatactatctatcttaagaatttttatacggaaggttcagaaaccatagaattaagtagtgaatcagatttctcacaattcaaagattatatagatggactcagaatgtcttaattattatgaaacccattaaaatagggagtttaacaactccctattttgaagtcacaattttttttataagctttaaaagttcgtctctatttacttctctttggttttttctgtctttatactcttgaaagttaacaacttttgtatttggtttttccataaactcacttcccatttaacattattaacttatcttaatatattttattctatacaatttatctatttccttctatttataatacaaaatttcttaaataatcccaaattttcaaaacaaaattttcaaaatatactaaaatctacctttcaaatataatatcaaataaaatttaataatctttatactttatagtataatatactcataaaatataataaaggagattttaaatgaatatattacaaaatgaaaatttaattatcgaatcaagcagttttggtgctgaactaactaaaatattttctaaaaaatacgacaaaaacattctttgggatggtaataaaaaatattggggtagacaatcacctatattgttccctatagtaggtaaactttttgataatgaaacaataatagaagaaaatttatatagcatgactcaacatgggtttgctagagatatggactttgagattgtagataaaggagatacatttgtatcttataaattaacagataatgaatccactttaaagaagtatccatattcttttgagctaatcataaactatacattaaatgataatagtattgaggtagaatggattgtaaaaaatactgactctaaagatatattcttttctataggtggacatcctgcattcaaccttcctttttacaaacaaaatgatttttctaaacactaccttgagtttaaaagtaaaaatgatgtagaaaaaatcaatttaaatggttcttttacagatgatataatacctattggaaaattaaaaaacttacatttaaatccagaagtattcaagaatgatgctttgatatacaccaacatagatgaagtgtctatatataataatgatggtagtaaatatgtaactatatctatggaagatttccctctagttggtatttggactccttattatagtgaaactaattctactgctccttttttatgtatagaaccttggtatggtcttgctgatagtataaattctaacaaaatttataaagataagaagtttattaataaacttagtaagggaaaagtttttactgcttcttacaatataaatatacactagataaaggttagctaacccgttcccaaaataataaaatatttttatataagttaatataagggtatgaaataatattatttaatattcctcaataatattccttaatcaaaaaatattactggaatacaaaattccagtaatatttgataactaaataatgtgtttttatataaaccatagatactttttttatgatttaacaatacatacttatatacgtttttttgattctatttagagcctcatttaatgtttctctaggacaccccacattaatacgaataaatccatctccatctttcacaaaataacttccaactaccatagttaagtttgcatgtctaaaaaattctttagattcttcttcatttctaaatacttctcttacatctatccaggctaaaaaagaagagtctgacttcatcactttggcttttggtatattagtttcaaagaaatcataaactatttcaaaattctcctctacataactagtcatagcatctagccattcttcgctttcattgtatgctgcaactattgctggtattgcaaatacatttggagaagttattgaattactttttagcctttctaataaagtctccctaatttttacatctcttattaatacatatgatgtttttaatccacctaagttgaagcctttattaggagatacgcagattatactatttttataaatttctggatgagcattccacaaagatacaaatctataatctttaaatattatatctctatgaatttcatcacttaccaaaattacattatactttaaacataactctgacacttgatatagttcttcttttgtccatatacgacctgatggattttgtggactacagaatataagtaatcttatattctcgtatttcatttgattttccatatcctctaaatctaaataatatctattgttatctaattttaatgagctacaacacaactttctattattatttgctacagcctctgcaaaagggtcataagcaggtgtatttatcaatacaccctctccttctttagtatatgcttgaactatataatgaagggttgaaacagtaccaaaagttaattttatccaatccttttctatatatacatcaaatcttcttttattccaatttataatagcatcatagaagtcatctcctataaaagtataactataatctcctactgatgctctttttaagatagattcttttatagcaggagcacactcaaaatcgatatcagctaaatccataggaattgcatcttcatttaagccgaatttttctttaatcacatggttgctccattttctacaatttccttctttacgatttaatactttattaaaattatatttcataattttactctcctaatattataaactctttggatgtcttattgagtggaacaccttttccatctattataacaatatcatcttctattctaactccccctacatttggaatataaatacctggctcacaagacattaccattccttccactaatatatcttcactatttggatttaaagtgggaacttcaccatctccaagacctataccatgacccagtccatgattaaaatattcgccaaatccatgtttatctataatttttctagccactttgtcaacatcacttgccctagttccttcctttattgactctattgcagataattgtgcttccaatactacatcatatatctctttaataattttaggaggtttacctatagatattgtacgagtcatgtctgattgatacccttgataaacaacaccaaaatctattgttatagcttcattcactttcaattttttgtttgtaggtcttccatgtggcattgcacctctttctcctgataccactattgtttcaaaagacattccacttgcacctttttttaatgcatgatactgaattagagctgatacttctagctcagtcatatcttttttaatttcagaaataacctcatcaaatacttcatctgtaatctcacaagcctttttaataagttcaatttcttctttagattttatagcccttagcttccataattcatttgttattaaattgatttcaaaaccttcattttttagtgaaagatactcttgtatactcatagcttggttttctattgctaacttttttatatttaattcttttaataactcaattatagttggtatataagaaccttgagatacaatcctttttatgaaaccagtcgtttttttatctgcttcatcaatatatctgccatctagaatttgataatttttatccttagtaacaagcacatatacaccactacctgataaagctcctatatatcttttagtattttttgctttaatcaaaagagcgtcaacacctcttttatagattaaggatactaatctctctattgtattattcataacaaaatattagaaatccaatcctaaatcatccaataagtcttcttcttctttagagaatatattcttagtttcttctttttgttttttattattttgttgacgttccattattttaaagaatggccaatataataaaactgctaatactaattgcaatgcatttgctaatatagaatgccaatctccattagttaaaaatccttctaagaatacccctacatatggagggtcaaatactggctttgctaaccatccccagtgcataaaaaacattggtagtgtacctattatagctccaccaaatacatgtggtataaacattattggatttaatattatcggtgctccaaataatattggttcatttatcccaaataatgcagggaataatgatacacgtccaatcttcttataggaagcattttttgataacatacatgcaattacacaacctatactaattccacatcctgtaaatccaaagaatgcacttgaagctcctgctgtaaagaaatgaggtattgtttctccagcttgcatagctgctatgttttcagctataaatgtaatcattataggtctagttataggactaaatactgatgaatgtattccaaaaaagaatatagtacatatagcaaagttaagtgcaagaactgaccatgggttatccatacttcctactaatggagataaaaattgagtaagtatctgtggaggtaattctccaaatacttttaatgaaataaaacgagcaactataaaagttccacaaactattatagtagtaggtattaattcaaaagacctagatacaaaatcaggtacattttctggcatttttattgtgatattcttcttattacaaaaattatataactccacagaaccaagccctgctatcatacctgtaaatagccctttagctcctaaatttcctatttctaaagctccatctggtgtaaatgaggctactaggaataaaaaagaaaaagttgatagtgcaacacaacctggtatatataatttatagtagttccccagattaaaagcaatacacatacaagcatataatcctattaaacctatggaaagacttactggtaaatccaatattgctgaattgttaagtatgaatttgcttattggattattttctccaagcatatttggaagtgctggaagtattgcaaatatacttcctaatattgtgaatggtgtcatagcaaccataccagcctttatagaaccaaggtgacgttgattgtcaaccttatgagctaaaggcataaatactctattcataaatgcttcaaattttgaaaacatatctaatctcccttttccctcattatttttattatccttgagctaattgatgtttcttataagttattaatgccaacttcataactgtagctccatccatttttccatatacatctttatctattactgcaaaaggcttattttttggctctaatattccttttaagaagtctattttatgagctatttgaggacctataagtactatatcccaatcatcaacttcactttctattgaatctgctggtatagctgtaaactcaaaatctttttcattgagtttagcactctcttttaccacctttttcatattttgcattaacatattagtagaaaatccacctgcacaacataataatattttcataataattcctcctaaagtttgtatttttattatctcttaaaagcatctaaacttttaaaagaatttttacataaataatctatttctacattacaattacttatcgagacaatatatcaaagcctctatcaagtcttttgctagctgagaagtcatatagtggtcttgagcatgtaccattaaaagactcattgttgggctttcaacatcttcatttaaatcttgagttattaattctgtctgtattctgtgagcctcaatatctattttacgagcctcctctattaacaattttgctcctttaaaatcttttgactttactttttttaaagcctcaaaagctttcgatttactctctcctgcagttgatataagctccattatttgtacttctgttgacattttcttattctcctttagataaaatttcttatatgtttatattgttcttcatcaaaatttaaaattaactgtgtatacaatcttataatgttctctaaatctttattacttactattgaaaatgcacaatgaccatatctaactggtacacaagttactacacaaggtttcccttcatttacgagatgtgcttctcctccatcagtcccacctgattcaaacatatcatgttgaagtggtatattatttttatcagcaatttccattacataatctatcatttttctactagggactagagtcctatctctatgcattagcattacacctttatcaatttgtttctgatttgtatagtctctcacaaactcatttttagcacatgctacatctattacaaatactatatctggatttattaactgtgttgatgtctttgctccccttattccaacctcttcactacttgtagccgcaaagtgaatattacaatttagattttctttcctaagttcttttaaaacttctcccatcacaaaacatcctatcctatcatcaaaagcctttcccactaatcggtctggtaaagtaaattcctcaaaacttgttgtatatgttaccatatccccaacattaatccctaggttatatacatcttcttctgtatatgctccaatatctgcatatatattttcagccttaccattattatatgtagcatttatgacagcagggattttctttccttcttttgttgtaattctaactttttgtacaaactgtgcaagaggttttactcctcctattgttattaagtgaatcataccaagtttgtctatacttctcaccataaatccaacttcatccatatgagcacaaatcattacgtttggtgcactctcatcttttattttagaaaagatgatactccctagcccatcacagataattttatcactataagcctttagttcttccaataaaacatgtctaacctcttcttcattagatgctataccatctgcttctgacaacctcttaaaaaactctatattcatgtctaacctcccagatagatttttaacttatacataaactcttcataagattgtgacttatttagcatgtctaccatatccttatttgccataatcttacttaaatatttagatatttgcttatgaagttctaaatttccctttattaatgaaatcatgaaaataattttgggcaccctattttcataaataatatcagtttgtatcaaagctactgatattatatttttgtttcctgtcatctcgattggatgaggtatagccaccccatttgtataaatagtactcaaatagctttctctttcccatacatctttgggataggttggagaacaagctccctcgtcaactatacattttgacatactatcaaggatatccttatacttagctttatcttttatacacctaaagtgattcttatcaaatagacctaatatatattgttttgggcttgatatatttcctatatggtctgcaaatctaacactttctttaatatctaaataatccaattcgtctaaaatttcatttataagtataactggagcatttatttcaaataaaagatttgttattgaaaaaatcaaatctggtgcaaattctattacagctttttcttctagtaatgaaaaatttcttatctcagcatttggaaaaatttctttaagtcttaaatttatcaaaaatgcactacctccaccagaagagcatattattgctattttatattttttattaaaattagcttcttctctcttttcaaaaggaacagcaatgtgagtagctataaaccctatttcatcttgacttatttttatatgatactcattttctatgatttttgaaaattgaatagataaattaaaaacagttggatactgttgacttattttaactgaaaaaggatttattatcttgtggttcttctttatacgttctattaaacatgcaatatgtaagtaaaataagttaaaaaactctttatcttctaaaaaattagagttatattttttatctatctctctaaaaaattcgaacataatatcttgaagtttattcttatcaatattctttatagtggctttcttatctttagtctttagttttataagctcctttaaataatacttttcatcataattaaggttatattttttatctctaaaaattttatctaataatttatctataattaaatcttctgtatataattttaaattgctagcatttcccactactctcatactaactcttatatacaatataataatttgtgctaatatttcctcaagttctgttaaatttgcttctaaatcatgttcattaagtacattttttattgtacttctaatattagctaattttaaattatctataaacttattcctgtactctgttatatttctattccctctaaaataactatccaccaatatactttgaatttctttaatagaaccttctattttaattccataatgagcctttcgctctagttttaattctgtatcctttatcttttcatctatcttttttaaatcattttttatttgggatgaacttactagaaattttttacttaactgttctatagttttataaccttcatttactaaaagctctactattatagactccaaccgttgttctggattttcaactaaatctgagggtaagtttcttagataatgctcgaatttatcttggtctttaatatttagaatatatcctaatttagacttatattctaatttaaaaccattacattcttttatagtttctatcttttttatttcatttctgatagttcgagtagatacccccaacttatctgcaaaataatctatgtttagataaccactactattttttaatgtttcaagaataatgcgttctctcatatccccacctccctcagtgttattattgtgttttttaaagtggtataaaaaatattttttataaaaacaaccttttctttttatttaagaattttatatcctagtatattttgattccaaaatttaatatacatattttataataataaaatatatagttcaatttttattatattttaattatatatgtaatactttaccaataaaagctgatatttttcatcaattaaatgaaaaaaatacaccatttacatataattaatataaatttttcatataacaaatatcctaaacttatctaaaataaatttaggatattttatttttatactctatttacagacccacacactttaatcttttcttttacaaaatccttcactgattgaagccctgctaatccatactttttagggtctataacctcagaatcttcatctaaaacttttttaacccctttactatatgcaattcttaattcagttgcatagttaacttttgcaatacctctttttatagcttcttttataatatcatcatgtattcctgaacctccatgcaatactaaaggtattgaaactacatttttaatttctgataacctatctaaatctattttaggttcacccttatacaatccatgtgcagtacctatagcaatagccaatgaagatattcctgttctatcgacaaactcttttgcctcttttggatttgtataatcattactattcccgccatctaaatcatcttcttttccaccaactttcccaagttctgcttccactggtataagagaaggactacatgcttttactactgatttagatatagatatattattttcaaagctttcatgagaaccatctatcattattgatgtatatccacttcttaaagctttcattgcaaggtcaaaacttgaaccatggtccagatgcattgctacaggtatctttactctttctgcagcaacctttgcatttgctagataataatcaagacctgcatattttacagtagatggagtagtttgtaatattactggagagtttaactcctcagctgcttctataacagcaattaccatttccatattttctacattaaatgctcctactgcatacccctcatcttgtgcctttttaagcattgatgttgttgttactaatgccacattgataccctcccaaattatttagttataatattttaatcttatcttttaatattcatatattgttacaccttttactactctatttactgttcctgtagctgatggcgtatctggcttatttccaacctttaccgatacaaacaatgctatagtttgtgcaaacaatatgtatggcattgcaagatacacatctggtaatttattatacttttctttaaactcaaactttgttcctgagaagttattttcattttctactgacactgcacaagtgaatttagcaattttatccctttttatctcctctaaaacatctaaatcatattttcttgtatataaacagttagatacaaattcaaatacaagtgtattttcatcaataaatgattttggtccgtgtctaaaccccataggagaatcatacaccgtagatatttttcctgctgtaagttctaaaagttttagttgtgcttcttgtgtcaaaccacctaatcctcctgaacctaaatatacaactctatcgaaatctttatttattaactcatgtatttcatcttttctatctataacatttcttcccatttcaattattgcatttatatatgacttttctacatcatcttctaaactatcgaatattaacatagcagataacatcatacacgaaaaacttcctgtcatagcaaagccttcatcatttgattttgatggcattaataacaagtaattattttcgtcgtttttagtcattttagctagttctccttgcggattacaagttatagctaaatgataaaaattatctacaatcttattccctaaatttaaagcagccaaactttcaggactatttccacttcttgcaaatgaaattaataatgttggtatatctttttttaagtaatcatatgggtttgaaactatatccgtagtaggtattgcttcaaatatgtattttcttatgtcatttttattcttaaggtaaggaagtattgaatttcctatgtaagctgaagttccagcacctgtaaatataactctaaactgcccatgattattacttattgtatctatgaatctatttaatttttctttgttagatttatatatttcataagtctctaaccataactcaggttgttgttttatttcattagttgttattattgcacctaaatcttttagtttttgttcttctaatttaaacattttcattctcctttcatacttgtaacgtttacatttggtaatgaggttataaccactttaaactataaaaaaatatactcttttataattttttgcttagattttttagtactacttaaactcactataaaatatacgctatagattttaattaattttatagtttatctttaaaaatttaataaaatcatactttagtatttttattttacgataaaaacttgttcagaccaaagtggtaattaccactaatccaaatataaattaatttgaattttttgtcaatacataaaatatttatatcaatcaattttatagatatcctacaaaattactttgtcaatatttcttatttcgttaatttacttatataagctttaaatttattttttgatacaaagtttacaaatttatgtgtctgaattataatcaattctgtaaatataaaaaccttaggagaaagtattatgaaaaatataaaaatgggaatgataggtcttggctccatagctcaaaaggcatatttacctatattaactaagtctgagagatttgagtttgtaggagcttttactccaaataaagttaaaagggaaaaaatctgtagtgattatagaattatgccattcgattctattgaatccctagctaaaaaatgtgattgtatttttctacatagctctacagaaacacactacgaaattataaaaatattattaaatttaggtgttcatgtatatgtagacaaacctcttgcttcaacagtaaatcaaggagaagaacttatcgagttaagtaagaaaaaaaacttaaatttaatggttggattcaaccgtagattctgtcctatgtacaaagaaattaaaaataatgctacagaaatcgtatctatcaatatatgtaaacatggattaaattccttaagaaatgttagattcgacagtacccttatagatgactatatacatgttattgacactgctttatggttagcaaatgaagatgttgaaattagcggagaagatttatttttaacagacaataagaatcttatatttgtaagtcataaacttaaaggtaaacatttctctgtaaacacctctatgcatagagattctggaacaaagttagaacaagttgaaattctttcaaaaggtaagattcaaagagttaagaatcttaatgtactggaaatagaagaaggtggaaacctaactttaaaacaaagtggtgcatgggtaaatatattaaaacaaaagggttttgaggatatatcaaatcattttattgattgtatagaaaataatataaaaccagctattaatggagaagagtgtatcaaggctcaaagattactagagaaaattataaattcagtaaaatagatatttattataaaaataggttaaaaatgaatttttctaacctatttttatataagactatatcttttatattaaaattaaaatctattacaacaacattaaatttattatattcccattaaatttatttaacttaacttttttacttcaactaaatcttgatatttatcaatttctcccaaatctacaaatccagtttccatatttaaagcattacttataccgcaagcatttgcaaatttaagtaaattttctattttataaccccttaaaatacctacactaaatccagccactgtgctatctccactacctacagtatttatacactttacaactggtacttttacatcatatacattatattcgtttaaatacaccataccatcttttcctaaagatatacatacattctctgcacccatttcaataagtttttttcctgacaagataatttcctctcttgattctatatttattcctaataaatgtcttatttcatctatatttggctttattaaatatggttttgattttaaagctatttttaatgcttctcctgatgtatctaatataaattttatattatttgctctacatatatttcctatcttttcataataatctatcggcatattctcacaataactaccagaagctactagtattttagtattttttagtacttcctctatatcattttcaaatctctctaaatcgcttttttctactattggtcctttttctaaaaattctgtactaactttattgtcctcaattatgtttaagcaatttctagtttcctgctctatttttgtaaatttattttgtatatctagttttctaagttcattttttataaattctccattaaatccacctagaaatcccatagctaaaggattttcttttaaaattttacataccttagctacgtttaatcctttacctccagcagttgcattcttacttactaccctttgcacctcacctatgtttatattattcactttatacattctatctatagatgggttgaatgttattactgtaatcatactagattctcctcattattaatttttacttttctaaacaataaattaatctgtaaaataaaaaatacctcatctataatatacccaaagtggttattaccaatttgaatataaattattttacttgttttgtcaatataccataattttataataaattaatagccttacttattgaattttgattaaactttattcattgacataaataattctatattctataatcaaattgtggtaataaccacttagaaaggactatgtttttatgataaaaagaaatgataaaagaccaatatatgaccagcttgttgagatattaagaactaagattgaaaatgagatggaaccaaacgatagaatgctttctgaaagaaaaatttgtgatgaatatggagtaagtagaaccacagttagactagctatggctgagttggaacatatgggatatatatacaaaagacatggaaaaggaacttttgttgctgcactaagtcaaaattctcaaaacttaatggaaagttatagctttacagattatatgagaatacaaggaaaaaagccaggtacaaaggtattatcatttgaggtagtagaaagtacaaagtatttctctgaaaaattaggtataactcctggtgaaaaaatgataaaaataatgcgtttaagacttgctgatgaccttcctatgatgcttgaaagaacatatcttcctatgaaagaatttataggattgacaaaagaaaaaatcgaacaaaaacctttatatgaaatatttagagaagattatggcgagattattaaagttgctgatgaagaattttcagctggaataatctctgataaggaagctaagttattggaagtaccaggagattcaccttgtctgaaattacttcgtaccacatataatgatgacaatatagttattgaatttactttgagtgttgctagaagcgataaatttgtatatagagtaagacatgtaagatagtgaattaaatagctttcaagaaaatagaatgatattataaacgtcaatgccacaatgatagtataattataaggaggttattttgaaaagttttatttatgcagataaattttttatgaaacatggaatcaaagaaaaaggttaccttagtataattaatggcaaattcggtgaatttcaacaagaaagacctaatattactgataatgtcatagatttttcaggtaaatatattgctcctggcttagttgatactcacattcacggtcttttaggtgcagatgtcatggacaatacatttgaagcaataaacacaatttcaaaaggcttattaaaatatggagtaacatctttcctacctacaactttaactgattctgtagatacactaagtgattctgtagaaaatataagcaatagcttcaatcgagttgagggtgcaaaaatacaagggatttatttagaaggtccattttttacagaaaaatataagggcgctcaaaatgaaaaatattttaaagaccctgacatcaatatattaaaattatggcaaagaaaatcgaaaaatttaataagaaaaatagcaattgctccagaacgtaaaggttcaatagaattaacaagatatgcaactaaaaataatatctctgtttctcttggccatagttcagctacatttgaacaagttaaacaagtcgttaattcaggtgctaaagtgtttgtacatacatataatgggatgagccctttaaatcatagagaacctggaatggttggggctgctatggtactaaaagatacttatgctgaattaatttgtgatggtcatcatgtaagcccaatagctgttaaaataatgatggatgcgaagtctagtaataacatagctttaattacagattgtatgagggctggtgctatggaggatggaaaatatactcttggtaagtttagtgtaaatgtaaaaaatagtgttgcaagattaaatagtgggagtttagctggaagtgtattaactatggacaaggctgtgagaaatatagttgattggaacatagccactttagaagatgcaataaaaatggctacatatgttcctgctttaagttgtaatattgataatgtctgtggctccatacatcaaggtatggatgcagactttatagtaacagataagaactttaatatatacgaaacttatataagtggtatatgtatgtacaaagttaataaatagattcaatataaagttatggaggcttcctaaaaatagagataagtctctttttcattgttaaaatgatgaaaatacatttgatttcatacaaaaagagtgcctcataaactaaaaagttaattttgagacactccttttattaaggttctttattttacaatataagtttataaaattaagaatctggaaatatttatgtgtattctttgaataaaaatttattttttagtgataattaaacatttattggtaaggctatggctttaaaaatcatagccttattttgatattttttccatttttgtaaaaattattacccctttaagaaaattccttaatttttttgaaatatttctttattaatttagagttaaaattctttcttcaaaataaatacttaaatgagctaagatttgagtccaatttctaatcttttgagtccatctttcagaaatatccatagttgctaagtataatgatttgtgcaaagaatcatctaaaggaaaaatagacttcgatttagtaacttttcttaataatctattgtaactttccattgaatttgtagtatatatcaatgttcttatctcttgaggatatttaaagtatgttgctagctcatttcaattgcttcgccaacttcttaatgctatcgcatattgattaccccatttttcctctaagagcgatagctcacttaatgctacttcctctgtaattgcagcatatactttcttttaatcttttgcacattcttttctatttttatatgatacataatttaaagtatttctaatttgatgtacaacacatctttgtatttcagtatcaggaaatactgctttaattgcatcagaaaatccaactaatccatctacagaagttattaatatatccttaactcctctgtttttgacatctgtaagcacctttagccaatactttgaactttcattttctccaatccatattcctaagacctcctttataccttctaagttaacacctatggctatatatgcagctttgtttattattctaccttcacttctaactttataatgtatagcatccataaatacaattggataaaccatatcaagaggtctgttttgccattcatgagctaaaggtagaactctatcagtaattttagctactagagaatgagatatatcaattccgtaaatactcttaaggtggcttgatatatctcgagtagacatgccttttgagtacattccaatcacttggttctctattcctgatatatcatttttataattactaattacctttggttcaaaatctccatttcggtctcttggaatatttaaagttatttctccaaaatctgatttaacatttttatttctatatccatttctagagtttttagtatttttattcttattgccatatctatcataacctaaatggtcgtcaagctccgcttctaacatttgatgaattgtactcgcaaataaatcttttagcatatcttgaatatctgtagttgttttaacatcatattcttcaataagtttttttaatatttcgtttttgttaaacataaaaagtgtgcaccttcctttatatagtgatatttaatattttaattatcaccactttttagaagaatacacactttattttaaagacccatttattgtaaagataaagcatggtctaaaatttcaaattttagaccataatcttatgtttttagataggcctaaaatatttagattagaaaataatcaattttaagacatccctattttatttataattatgtacattttacactatcagttaattagaattatttttattcatatttaaactattcaaattgttttcccaattttttatctccttcttaatgtcttcacttaaagtatcacttgaagacactttctttaatttatcattcaaagatttcttttgttcttctgaaagatctgtttttattgtaggatcaataatatctattacatcttttatatcaaaatcaacaaatttgcataattcatctaaatgatcaattaagaattctatatattcatatgaccattctttataattttttttgttttttaacatgaactcattaatttcataactttgatttgctaattcaaagaatgaacctgaaggatccattatgtcatttatagagttttcatagttaacaatattaatttgtcttattaatttctctttttctgttaagttactataatttttgttaacaaaagcaactaatccaaattcaaaatttaaaattgaatctttacgctgttttactgaatcttctccaaattctctaagaccttctaaatttttatcaatagccttatctctaatttttgttaattgttctatacttaaagcttctaagtttttaggcactatttcttcattatttttagcaatttcttttgatttatcatttgtatttctattattgaaaacaaatatagcagtgaataaacttaaaactattactaaaacaattaaacttacattttttttgtttaacatatcaaatctcctttttaataagtattttatttgtgaaaaaataactcagtttattagaataacctttattactgattattctaaagaatacaatagaacacttttttgatatagtttatataattataacgaatgataaactaatttttagacaaatttatataattcttttattaaatttttaaatcataaaaaagagactaaattccactagtctcttttttatgattatgtaataaaatttaatagctgcttcaactaaatacttattggatcttgaaatagatatttattcttttcaattttcatttaattaaaagtataaatttttatttattcccaataaactttgtaataagaaattttctttccttcaagtttttttaacaaatttgttcttgcaccttcatctgaatgtgcagcatatgaaaaattatatccatttgaatgcttatctgtagatattagtgtatgagttgctactccactactatttaatatacttacaggtgttgctggtcttaaaaaacttaaagagtttgatacagtaagtgtttgatatgcaattcgattcatccaatgtattttaaattctcttgctccagcccaagaaggtgatctattactagtagaataataataccatggattattattcgtccagaatgttactccagcttcatgtaagcattgtgaaacaaagttagcacaatctccatatccatctttttgaaaattataatatggagaaggtgcattattttttctatttgtactaccataataaccattagtatagccatgttttttagcataagctaatgcttgttgtctataactagaagggcttactcttggtaaaggttcatttgaatttttctcattaatatttaaattattttcccagttttctatttcatcttttatatttgtacttagagtattacttgaatacatttttattaattcattatttagagatttcttttgattatctgaaagatctggttttattgaaggatcaaccatttctattacatattttgcatcaaaatctacaaaattacataaatcctctaaatgctcaatcaaaaactctacatattcatacgaccactctttatagttttttccattttttaatacaaattcattaatctgataactttggtttgttactttgaaaaaatcgcctgaaggatccattatatcatttatagaattttcatactcaacaatattgatttgtcttattaatttctctttttctgttaagttactataatttttgttaacaaaagctactaatccaaattcaaagtttaaaattgaatctttacgttctttcactgaatcttctccaaattttctaagaccttctaaatttttatcaatagctttatctctaatatctattaattgttctatacttaaatcttctaagtttttagagaccatttcttcattatatttggttacatcttgtcctttcacattagtattttcatcagcgaaaacaaatacagtagttgataagcttaaaatcattgtcataataattgaacttatattttttttatttaacatattaaacctccctctttaatatatgtattaatacttgccaaaacaaaaatcatattctactaaaatttaaaacaagtttatcaccgtttttttctaaaagagcgtttactaaatatcataatataatcctccctttctagtattatttatatatataacgaataaagaatcgttttttagacacttatatataaatttttttattaattatcaagaattaatttttaagtaagatttaattatcaagagtagaatcataatatataaaataaacaatcaaaaatagtgtaaaaactaatactttttgttaatattaatagataaagataaactaaggtggtgattaaactgacaatagaagaatacaaaaataaatactctactggagataaaattatactttccttaaagagttttgataataaagaactatactatcatgaaactgataacatattaaattcaaaagatgaaatagatagattaacatcaagcaagatatttaaaataatagaagataaaaatgatttagccttagagtcttattattctagtgtaatagaaggtgccttttcaactagaaagattgcaaaatctataattagaggaaagatgaaaccaagtaataaaagtgagtatatgatttacaataatcatagagccttagaatatggattagataatttagataaattatatagtcacaaatttatatataatttacatcatatattgggtgaaaactgtttagattcagaagaatatgaatatagaactgaaaaagtatatgtatgtgattcaaaaggtgagattatacatacaggacttgatcctttgaaaatatataattttatggatgaattaataatttttatggaaaatagtaaagtaaatgatttagtaaagagtacaataattcatttctactttgtatatgttcatccttttagtgatggtaatggaagaacatcaagagccttatcatatctatatttaattaataaaggatatgatacttttaaagagttttcaatatcatatataatatctaaaaacagaactaagtattataaggctatactagatgtagagaataaaggatataatttaactgtatttatagagttcatgctaaagtctataatacaatctatcaatgaaatgcgtgatatgcatgataggaagtctttagagagtatattaaaagaggaattatttgaaaatgatataactctatcagcaacagaagaacatatattaaaatatatctgtagtaaagataattattctatgacattagagaactatatcaaaaagaataaaggtagatacttaaaggctggaataaaagaaatcgaattagttgaccagttgatggaagtgtttaataatcttgaagaaatagagattttatctagagaaaaggatgtatataaagttaatgagaagtacttgaatatgcttgaaataagttaaattgaagcatataaaaataaaaagtatataaagttatataatataataataagccctctatgaatcgctcttaattgagttttcttagagggttaaatttttcattcttaaaataaaaagatttttattttgtccaaaattacttttattattcgttatatatataaataatcttataaggaggtctaaattatatgatattaaataaaactattatgaaataagacaaggtttgattgtgaagttatataaaaagattatttttaatataactaacaggttatatgacagtgtttatagaataaatatttaagtaaaggtagtaaaatattatgttaaagaaaaaaataataagttttttaatggcaggaatatttgttttatctagtggatataatttggtttatgcatctacttttgaagaaaatgaatataaacaagaacttgttaatgaaaacgaatttactattattaatagcaatgaaaatgaaatgattgtggataaaaaaggcaataacacttatgtttcaacaaaagttacacctggtagttggaaaaatgttaaatatctaggtcaaaaatcacgcaaattaagttctccttatacaagagaaagaattatacaaactattcaatggggattaggttatctttctggagggtcatcttttttattaggtttagctgagagtatttatagagaaaaagtatatgacattactaaatatggaggcgtatatacaaaaacatactataggagacaaataactgatattagaaacagtcatgctaatgttcctgttccatacagatatgaatatgttacatatttttatagctcatctaactttaaaaaagttgtatatactgaaagagtaggagatggtataaaactagcaaataactaggaggaaatatatgaataataagaaaaaatcattcttgatttctggcactataaacgtaattttattaatcattgtttttgcattgtttagttataatattatagaaaatagtacacgaaatatgataataactgtaattttaatttttatttttgaaattataaaaataaagatactagagaaatattataatctataaacaagaaatatctttcctaagagcatattgtaaagtatgctggtacaaatttacattacaaactatctattctgatgtaaaaataaaatcaaaactccaattaatttacaaaaagcatggcaaatctttaactctagttttacatttatgctataatattatttatagagtaaacataggtggaggtatcaaagatggtagtaggttatatgagagtttcaacagcagaacaaaatgaagatagacaattagttacaatgaaaaagcataatgtagaaaaaatgtatcaggagaaaataagtgccaaagatactaaaagatcaaaactaaacgcaatgttagattttgtaagagaaggagatacaataattgtacatgactttagtagacttgctagaagtactaaagacttattagaaatagttgagctcttagaaaagaaacatgtaaagttaattagtgataaagaaaatttagatacaagtacacctacaggaaaacttatgcttacaatgcttggcgcaatatatgaatttgagagaacaaacatgttagaaagacaacgagaaggtatctctatagctaaagaacagggtaaatataaaggacgtaaagaagttaagatagacaactttggtagttattatgatagatataaaactagagaacttaataagactcaattggctaaagaattgggagtaagtagaccaacattagatagattaataaagagccatgagagtaactaagaagagcaatatatatgcttaagttaattttagtggggcaaattcatagaattatgccctttaattatgtttaaaataattataaataactgtttttcagtatagggggtatccttctatttcaaaaaagtattatttatagaaaatgagttctagaaattttctagcaaaaattaaaaaccagagacatatttcaaagagggtgattttattagaaaaaaatttgcattgtttattttattaattgtattactcactgaacctaaaaaaatagaagaattaagaggaagtaaatacgagtggataatttagaaagaaatatacaattaatatttagttatatggcaaagacctttataagaaatggagcaactataagagaagctgaaaaagaagcaaatgagattataaaaactaattcaagcaatctttggggagttaatggcctagcttatcagcttggaaaaataaatttagaatttttctgtatgtattttatacaagacacatatttaccaaaagaagataatgttgctgctcctatagctaaagttcatcatgagttatgggaagatatacaagagtctataattggagatggttcacagcaattaggaagaatttatccaagaggaacaggtaaaagtgcatttggagatttagcaacaactgtatggtcacattgttataaacataagacatatactttaatttgctctgatataggctctacagcagaaaaattcgtaaaagatataaaaaatgcattacttgaaaatgagtatattaaaaaagcatttggagttctcttaaatgataatgatagaaaatatatttgcaatagtactcaattagaattaactaataaaacctttattgaagcaatatcatcttcatcaccaatgagaggaaaaaaatacaataataatcgtccagatcttatcatacttgatgattatcagtcagaagaaaatgttagaacagaagatgctagagagaaaaaatttaaaaaattttctgatgatgtaaaatatgctgcttaaaaaccagtaataagaaatggtaagattataaaaagaggaacaacttttatagcattaggaaccttacaacataaagaatgtttctatagtaggctaaagaatttaccaacttggaaatttaaatgtgaaaaaggagttttagttgataatgtagatgaattatttaattctggtttatggcttaatttcaaagagttgttatttgatttcaaaaacacaaatcatcttgaagatgctaaagaattttactgggaaaatgaaaaagaaattaaatttcctatattatggccaagtttttggaattgtttagacatggctttaagttattacgaaaacccaacatcttttaaacaagaggtacaaaatgatgtaaattcaataggtgagaaatggtttaaaacaatcagaacttaatctagagaatgtatagaaactcatacattcaaaaagacaatgttattatgtgacccagcatctgcaggtggttctaaacatgactatagtgcttttcttgttggaagtgaatcagaaaatggtttactatgtggcagattggcagaactagccaaaataaatgctagaactgattttgataaatatatattgcatatgatttatttattaaaagtgtatccagatataacacatgtttatatagaaaaaaatacatttaatggtacagctgctaatcaattagaacttaaaataaaaaatgatgatgttctttactacagagatatagaaatcattaatgagcaccaaaagaaaaataaagatgataaaatctctactttaatacctgttttaaataaaggtcaaatgatttttgcagaagaggataaggcatttatacagcaaatccttaattttacaggacaaaagtactctctacatgatgatgcaccagatatatcagcagaatttataaataggatttttaatattaaagtaaatgaaagtattacactattagatagaagaaatttaggtctttgattgtatggaggtgatgcattaaatggaaatagatttaagtttattaagagaaatatatgaagactagagtttaaaaaagcaagaatacaacactatgtataagtattataaaggtgaaacagatgctattagtaactataaaatggttaccaagaggtctaataataagataaacactaatttcttaaaaaagtttattaatgaagaggtcgcttattctcttgcaaataaaatcacctatacaagtagattaggtgatgagaagattataaatgatttagaatactatacttgccattggagtaaaaagcacgattcagatttattgagatatacactattatttggattttgctatgaactttactatgtaaaaaacaatgaaatgaaagtaagaataataaaaccaacagatggctgccattatgaaaatgaagatggagagaccatctatttttttagagaatttaaaaaagattttaaagatgatatttatatagatgtatatgataaagaatacatatatcattttgattcaaattttaaagagatagaaaaacctacagtaaataatatatttaatggtaatgttccaatatcaatttgtaaaagaagtgaagaactaggaaaaaatacaatattcaatgatataaaaggattacaagatgcttatgaaactaatttaagtgatataagtaatgaaattagtgattttagaaatgcttatttaaccttctctgaatgtaatattaaagaagatgatttgccaaggatgaaagaacttggaatacttcaagttaatggagatggaaaaatagaatggcttattaaagacatgaatgatacatttgttcaaaatacactatcttcaataaaagaaaacatatataaaattacatctcatataaatcacaatgaaaaaatgcaaagtaatacatcaagtttagcagttgtagcaagattaatcagtacagaatggatttgtagccagaataatgatagtattgcagatactttatttaataggtacaaattattgtgcatttggcttaataaaaaatatggttttgactatgattataaagatattaaggctaaatttacccctaagataccacataatgatttagttgtagcaaatatattaagtcaacttggagataaattatctactgaaaccggattatctcaaccaagttttattgataatcctcatgcagaaatggaaaaggctaaaaaagaacaggaaatagtttcagagggagagattttattagatgaatcaaaagattataactaaattgactgaagatatatataaatctgctgaaaatagaggtgcaaaatcggacgtaagggaattgtattggcttagtcatacaaaagctccagcgatattaattgaagtatgttttgtagacagtaaagcagatacagactattaaagacatagttgctaaattaatagcagaaggtattttgaataaaactatagataatagcgagggaaaaatcatgtataaacatacaatcatttatgatggagaagctgatatgatacctgcaactgtgattggttggggttataatgatgggaaaatactgatatgtgatataaaagattatataccaggtcaaacagaaaatttatatataaattatgtttcattttctataataacttattttataaaatagagtgccaatataaaaaagtataaatattatacacctattttatattggcactctatttaaaattaattatatttgcttttaaaaaactattattcttgtttactacaactcataaatacaatatctatttttaatatttctttgtactacttattatatttttactttcagagttagcttttattgtggaatgaactctgtaatatccttttcctatagtttttgacttagaaagagaacatgaaatatttcctgaagcattccatgtttggattgttgaccatgttttcccattatcattgcttttctgtaatctagcaataattgatgtgcttgtaacatttgatgctcctctaacaaagcatgttactttagctgtacttcctgaaatacttaaattgcaagtaccagacttaatataagacattttcaccatagtatcatctatatagtttactgctgaatattgttcaatattcttatcttgatattcatcagcaaatgcaggtattgcaactgctgatgaacatactaaagcacacataccacttataactgtttttctaagattcataaaatcacctcttcatttgttttctatttatataacttatataacgaatgaagaagtgatttttggacactaatgataattttttttattataattttaaattatacattttctttataatagaatgtctttaactataatagttatgaatatctgtaaataatatgtattgtgactatcccccaataaattcatgatttttattttacttataatattaaattgtaaacatctgaactagaccagattttactactaagactccgcctcctgttgtacttgtacctttcaatatagctttataatccccttttttaagatatttaacatctatttgtccagatatagttgaagatcctccaccacttattggatatgatgctacaagcatattttttgaatttctaatctcaacagttcctgaaaatagtataactattccttttgaagatgttatcctccaattaagatgtttacttgacatataacctatatatgcagttcctccactaccatgtgtatatgctttttcattactttgaaacactaatggcgcctcagcataaattgaatcattttcagctttttcattagcaaatactaaagttgatggtaatataactaaacttaaagtaagtaataacgcaaataatcttttcatgtgtattcccccagttttaaattaattttcgaatatcaaaggtttatcgctttccctcgatttaatgacaacatcataattatgtttagcaatatcaattgcacttaaaaaaggtgcaagtacactttcaataagagacatttcttcatacagtatatatccttttcctgcatagaaattagttaatttctcaatatttattttgcatagaatagatattgtttctaacgagaatttataatcgtctataagaaaacttaaatcttccataaatttttctagaacttcgttgtctctatacaatttattacttttacataaatataaatctgatttcattttttacacctcaattttaaagttttattcctattgcaagcatgttataactataatgtattaatttttcctataacaatatttttaacgctcaggtaaatgtagattttaaaaccataaaaatcacctcacattttcatatatacttgtataacgaatgaagaggctacccttggacacttaaaaaaattattttatacttttcgctatttttatcaaaatatcttcataaaattcagattctccactattttgataatctacatttaataaatatataaagttgttgtcattccaaaataactgtaagaaagttccttttactatatattttgctttatgcccatttacaaatatatctttaacttttgcattttctgtatctaatataatagaatttgaactaattttatctgttacatattgtatctcaatattttcatcatttctatatgtaataacaaaatcatcaactctatcaacttctttaaatccttttggtatatactcaggttctttattttttaaactaagattatcttctccattagttgaaaaaacaaatgaagttaagtcttcatatactcttattactaatctaaagaaacgtgaacgcaatgcctcactactcatagtaatagtaagtaaactagctaaaactattaaaaatacaatagctgtttgttttgaataaaaaatgattttatttgtaagactacttcttttttgttgcttaatgagttttttcatttttcgctcaaaaccttttgaaaaaacatgatttaattcatcatctgaaagaaggtcatcaataataatttttgtcgctattgggatactttctctaagcatatcatccgtaatatcaaaatcatcttttttattactcaatatttccaacctccatttcttctaatatttcttttaatttttttctagcacgctgaattctcttatatacattttcctcccctaaatttaatgcatttgctatttctttatttgaaaaaccatactggaactttaaggaaagcacttgaaagtaactttcattaagttttgcaagtgctatagctaaattactttcacatactttatcttctatagaaaaatttatctccctgtttttatactcttcttcaatatcagataccttttctctttttctctttctgtaaaagtctatagcaatcctttctactattataacgataaaagccttcgttcttggactgtctacctcatcaattttatctatatttttaattattcttaaaaaagcattatgtactgcatcttctgataaatgatcatcctttaatattttattggctacataaaacattatttgtctatacttttcatataccttttcaaactttattttatcttcttcgagttcaagtatagctagataaattaacatttagaattcctccaatataaaaattctgaattaatattttaaagttcaattataacataaatatataattaactctacttaaatagaatataactatgcttaacaagctttttaaagatatctagtaaaaaggcccttcaaatccattttcgggattataagggccttaactctacaaatgattctcaaagttaaatttttaaattaattattttcgtatatatctaattccataaaaattaatctttttttgttttgatgtaatagtatataaacaaaagtacatatgctaaaggtattaaaagcaatatttttaaatcaatatcaaatgtattagtataaaatgataatgcaagtgataatatcacaattatcaggtttggaattgtttttaaaaaaaccttataaagcctttttttcatattattcctcctaaaaaagcatgtcttttaagtttgatagaaccaatgatcatatctataagtatatgttgcaccctgaaaattccacttatcctctatatatgataaaacaatcccataattagtatttataccatccatgttaattgttattatctttccaattgccactacatcaagctctacccaaatttttggtaaaaaacctccaaaagtagatgcaagatctgttccagcttttattttctttaatgtctttccacttacataaatatataaatagtttttaccatttttagtaaaagttctgtatttgttatacccatttatatatttcacacgagaattttgatttactttcttagcagaatcgtccacttcttgattgattttatccaattccttttgagtaaattgacctgttttaattaagatctcatcaatcttttcatctgaaaaaattttatcctcaggccagtaattatgtaattcctctacttctttgtcagacaactctattttcacattattatctgattctgttttttccattgcatttgctgtaacagcaagtggtaaagatattatcacagctgccatcactgttgataaaaggagattaattcttttgatattcatttaaatccccctaactataataaatttaaggttttaaaattaaccctttacatatataacatatttaattttgttttttggacacaagttttaaaaaatttatatttttaaaacttatgaaaatataacaaaagatacttgatttgagagaagtgtttttaatattattatatttcaaacttaacgcagttaaggttttgtaattatttatatttgttatttataaaattaattttaatatagttcagtttttaattgacttcatacaaaatagaatataacttatacaataagtgagtctggaaatatttatgtgtattctttgaataaaaatttatttttttagtgataattaaacatttattggtaaggctatggctttaaaaatcatagccttattttgatattttttccatttttgtaaaaattattatccctttaagaaaatttcttaatttttttgaaatatttctttattaatttagagttaaaattctttcttcaaaataaatacttaaatgagctaagatttgagtccaatttctaatcttttgagtccatctttcagaaatatccatagttgctaagtataatgatttgtgcaaagaatcatctgaaggaaaaatagacttcgatttagtaacttttcttaataatctattgtaactttccattgaatttgtagtatatatcaatgttcttatctcttgaggatatttaaagtatgttgctagctcattccaattacttcgccaacttcttaatgctatcgcatattgattaccccatttttcctctaagagcgatagctcacttaatgctacttcctctgtaattgcagcatatactttctttaaatcttttgcaaattcttttctatttttatatgatacataatttaaagtatttctaatttgatgtacaacacatctttgtatttcagtatcaggaaatactgctttaattgcatcagaaaatccaactaatccatctacagaagttattaatatatccttaactcctctgtttttgacatctgtaagcacctttagccaatactttgaactttcattttctccaatccatattcctaagacctccgttataccttctaagttaacacctatggctatatatgcagctttgtttattattctaccttcacttctaactttataatgtatagcacccataaatacaattggataaaccatatcaagagctctgctttgccattcatgagctaaaggtagaactctatcagtaattttagctattagagaatgagatatatcaattccgtaaatactcttaaggtggcttgatatatctcgagtagacataccttttgagtacattccaatcacttggttctctattcctgatatatcattttcataatttctaattacctttggttcaaaatctccatttcgatctcttggaatatttaaagttatttctccaaaatctgatttaacatttttatttctatatctatttctagagtttttagtatttttattcttattgtcatatctatcataacctaaatggtcgtcaagctccgcttctaacatttgatgaattgtacttgcaaataaatcttttagcatatcttgaatatctgtagttgttttaacatcatattcttcaataagtttttttaatatttcgtttttgttaaacataaaaagtgtgcaccttccttatatatagtgatatttaatattttaattatcactactttttagaagaatacacactttattttaaagacccacaaaagagtgcctcataaactaaaaagttaattttgagacactccttttattaaggttctttattttacaatataagtttataaaaattaaactttatttatcaatctgttctctaagccatttagtcgctacatctaactgtttattttcatctttttcttcaatagtaggctttatgcctttttcattgatataatctccattaggtgtaaaatattgagcagtagttaacttgtatcctgttccatccttcaatcttacaactgattgtaccaaccctttaccaaaagttgtagtccctacagaaataccttctttattatcaacgattgcagctgttaatatttcagcagcagaagcactttctccattagttaacactactattggaagtcccaatttttctttatcagatttcaagtactcagtatttcccttattatcttttgtatatactatagttccttcaccaattaactcatcagcaacttctttacatatatctagcattccaccaggattatttctaaggtctattactaatcccttgatattttttgcttttaattcttttaaagctttatcaaagtcagtatatgtacttgatataaattgggtaatttctatatatcctaaatcattatcaattactttactttctatactcttctcaattatctggtctgtttttactttaaagttcaattgtttatcttctcttaatatagtcagttcaactgttttcccttttttacccttcatcatacgaacagcttcatctgaatttttatatgagacagattttccattgacttttactaatttatcccctgattttacacctgctttctctgctggagaatctttcatgggaactactactaagccaccatcttttgatgcccctatatacatacctacaccaacataagaaccttcactatcattaattagattctccatttcatctttagtataataaccagaatacttatcatttgttcctagaaatagaccttttgctgctccatttaccaaatcagtatctgatacttttttataaaaatcttgttttataatagattctagtcctaacaacttatcatattttttatagtcttcatagagttctttcgatattacaactttattccccaatgtcaactgaaatgctgatgtaaccatagctgttataattactaaaatcacccctaaaaaaatagctttcttctttgaaatcacaagatacatctccttttacataaactattattattatatgactagctgttatttttattacatttacccaaatatattgctttattacaataaattatactaaaatttatattaaatacaattgctgtacacattataacatattaagggaggaattattttatgaaaaaagaatttagaaaaaaagttattgaatcaagaaaaaataagagtgcaaactttgtacttagtaattcaaatttaataactgaaaaattacttcaaatggaagatataagaaatgcaactaatataatgctttatctaaattttaacaatgaagttcaaacagataatttaatcaaaaaacttttgtctctaaagaaaatagtatcaagtcccatcacaataaaagaaaatcatacattaatccctactcaaataacagatttaaaagagggattgagaattggagcatatggaataagagaacctaacgaaaaatcacctacaattgatattaaggccttagatgttgtaattgtaccagctgtagcatatgatatacattgctatagattaggatatggtggaggattttatgatagatttttagaaaacttaagaaaagatgctataactattggcatagcatttgacttccagatattcgattctattccaaaagaaactcatgatgcacaattagactacatagttactgaaactagaattatcactccaaataattagaacattaagtatttccagaccccatttaatatagtaataaatactactgttaatatcttactttataagcattttaagtcatggcttttacaacaataagaaccatatacaatttacttacattaataaaaaccatgactttattgtacaatatgcagttatttaattataaaataccttcttatttcgtcgcatttaattctattctatctggaagttcactcatatttgtttcaacaactatgtatggaaaagaatcttccttatctttatactttatcttgactctcaaaacatcctttccttcctcaaccacactttctattttgtccatttctataccatatttattatttcctctagtcactataatgtatattttgttatcgattttagccgctaatgctctttcttcatttgtatacttatccatcacatctaatatcttttctggtattgaatttctttgtaatactgtataatctatgggtttagatttctctacaaacatacttggtatgaatataaatccccctataacgaatacaagagctataactccataaattatacctttaatattaaattttacattcaatcttatcactcctcccatatattctaaatatatgatttataagcttatcttagactctaaattattgattagtatatatttatccataattataaatatatgtaatgtaactaaaaaacatgtttttcctatttcataataaacgagctaaaaaataaaaagagctatatgaaaacattttcattgttttcatatagctcttgagtttacaatattaaaaaatacttatttgtcactgattccttcttgatatccagatgtttttgtaatctgtctataaagaacacaaaccagtattatgacgcccatatatccagtatatggatataaaataccaaccagcttatcaaatggtaggaagccacctataagacctaatatagctgctattaaagttattaatttaaacttaggatgtttatcatctacaaatctattagttactgaccataataaaggtacagctgttgtatatatacctaatataagaattattgagaataaaactccaattactggtgaaatcttatctgctaagaataatgatggtattgcttttgaatataagtttcctatatcagaaagaatagctaagtgcatcattatagctgcagccataagtgctactccacctaatataccaccacaaatagcttcttttttgttagcagcacttgctcctaatccagttaagaatgccataacaacaattgtgttataagtagtatatattacaccagatagataggcatttggaactggtttagctatctttacagtgctaagaacttgtgcagcttctcctatattacctatgtttttagctaaacttataccaccaactaaaagtgtaaagattattattataggccctattccacctagtatctttgataatttatcaagacctagtgaaacagttaataatgctactactgccatacctactctacctacaaatggatttaatccatagtattcagttaaagttgctcctgctcctgaaatcattactacgaaaacaccaaataagaataaaggtccaaaccattcaaagaatatccctaaatacttaccacaataaacacgataaattttgataggttctttaagttgaagctctttaccttttgacataactgaagcacccatccatgagaataataccattgaaattatcccaccaataatacctgcaaaaccataaaaagagaagaattgcattatttcctgtcctgttgcaaatccagaaccgattactgttgctacatacgcacctgcgaaactgatgactgttttaacatttactttttctgacatatctcagttacctccccatgtgaaattttttcttctgattaaataattcgataaactacctacaatttcctttaacataaaatacatgataactgttttatagctttttagtataataacttaaaacttataatctgattttataccctactcctcctctcataatttttttagattcttttatctaagtagtcattatatataaaattagtttctctatagattatatattagtcatatttttctgaatagtcaatatatatttgaatattttctctatttttgtaaaaatttgaatattttattacatttttgatatattgatatcatataaaaaaaagagagatataaattaatataacactttatacctctcttttaaatatattatattattaacaaacatgaataatttatatctcttacattctttttgcaataatagcttctttaacagtctttattatgtcatcacaagttaattcatatttttttaacaattcatttggagtaccagattctccaaatgtatctttaattccaactttctttacaatggttggacaagactctcctactacctcacttacagcagaacctaatcccccaattatgctatgttcttctacagttacaatagcattcgtttcttttgctgattctaatattaaatctttgtctataggttttatcgaggacatgtttataactctagcatttataccttcttcttgcaacttttcttgtgctaatagagcttcatttaccataattccacaagctataattgatacatcctttccttctcttaagactgtaccttttcctatttcaaatttataatcttcatcaaataaaactggtactgaacttctccctaatctaacataaacaggtccattatacttagctatttcaaaaataattttttctgtttcaactccatcagctggaacaagaactgtcatatttggtatagctctcattatagcaatatcttccacactttcatgagatgctccatcctctccaacagtaagacctgcatgagtagcacatatttttacatttagctttggataacaaactgaatttcttataatctcaaaagcccttcccgtagcaaacatagcaaaagtacttgcaaaaggtattttaccagcagttgataatccacaagcagcgcctattaaattttgttcagctatacccatattaaaaaatctatctggaaatgacttgtaaaaatcatgtgtttttgtagactttgataaatctgcatctaatactacaacattgtcatttatttgacctaattttactaatgctttaccatatgcttctctcgtcgccattttactcattgtcagcacctcctaattcaagcaaggctttttctagctcctcatcacttggagctgtcccatgccatcctgcttgattttccataaaagatattcctttgccttttatagtttttgcaactatcattgtaggttttttaactgttgatttagctatatcaagagccgcaaatatttggtcaaaatcatgtccatctatctcaattacattccaaccaaaagctttaaatttatcaactattgaacctaaactcattacgctttctatatctccatctatttgaagtccattattatctaaaaaagcaattaaattatcaagtttataatgtgcagcactcatagcagcttcccaaacaattccttcttgaacctcaccatcaccaagcaaagtatacacattccacggagcattatccaactttgatgccatagccataccacatgctactgaaaaaccttgacctaaagaaccagtagatatttccacacctggcgtgcctttcatgtctggatgaccttgtaacatccttcctatcttccttaatccattcagttcttccttatcaaaatagcctttttcagccaatgtagcatataatgctggtgcagcatgtccttttgataatacaaatctatctctatcctccattttaggatttgaagaatccacattcatttcatcaaagtataacgcagtaagtatttcaactactgataatgaccctcctggatgtccagatttggctctatgtatcattgaaactatatctcttcttatgatacgcgcaatctcatttaatcctttatggtctctcatgcaattacctcccttgagttcgtaattttatatcaattccatattattatatcacttttatgctatttttttgcgttatttttaattttattaacatagtacattaaaattaaaccttaagagatatttaaaagaaaaaagggattgtctaataaaagacaaatccctctttaaaaagtaaacaatcctaaacttatttgaagtccatcatctacttttatcatcatattttcatctagacaaccaattttttccctcagtctctttttatcgatagttctaatttgctctaaaagaattactgagtctttattaagcccatattcattggaacttatctctacatgagtaggtaatttggctttattaatctgagatgttatagctgatactataactgtaggactatatttattacctacatcattttgtattatcagaacaggtctaacgcctccctgctctgaaccaacaactggacttaaatcagcgtaatataaatcaccacgctttatttcacaattagtactcaccttgggcaatcttcccttcatttttatcatcagaagatacttcttcaactgtcatacctaattcagctagtgacagattaatttgacccatttctctataacccgttttcatagattctttaatatgaattttctttttctgagttatatagaactgaaaagcagcttttgcaaaatcttctctgttactgttctccatctgaactatactatcaacttcagaaatcagagagtcaggtaaagtaacttctattttttctttactcttatcgtacacaaaatcgcctcccagattataatatcatggttttattttagcaaataactgtttatttgtacaagctcattattttccatataaacacggtcaactcttcttgatatcatacataacacttcatagtttatagttcctaagtctttagctatacgctcagctgtaacttcgccttctccaaatagtataacctcatctccaacttttatgtctatatctttgtcaattctaaccattatttgatccatacatattctaccaactacatcaaacacttctcccttaataagaacctttggatttttttggattctagtaaatccatctgcgtatcctattggaactgtagctattgtttctttacctgtagttgtgtattttagtccataacttattcctacacctggttcaacttgttttatatgtccgatttttgattttaatttcatggctggtcttaattctaatctatctttaaatacatcatcagatggataatgaccatataatattattcctgctcttaccatatttaatcttaaatcagggcaatccataatagctgcactgtttgatacatgttttatagctatttttacaccagcctcatctaatttatcagacataaatttataattattagcttgtttataagtgtactctttacttacttcatcagctgtagcaaaatgagtaaacataccttctaaatcgatatattctaatttatttaattctattatttcctgtactgactcctcattaggttggaaacctattctagtcatccctgagtctattttaacatgaacacaggctttttctcctaaagattttgcaatttcatttatcttttgtgctgtttctaaagaataaactgtcatagttattttattttttatagaatcttcaaaagcttcgtctggagtatatcccaagttcaaaataggaagtgttatgccattttgtctaagttcaattccttcagcagttcttgctactgctaagtaatctactttttctttttctagcaattttgcaacttctactgcaccatgtccatatgcatcagcttttattactccacaaatcttaatatcttcttctaataaatttttaatattatttaagttaaatcttaagttatctagatttatctctgcccatgtaggcactgttattttttgcatgtctttagtcccccttagtttctgtattcaaaatctttgtattttactgtaaatcttggcactccctctttatctaacacttccattttttcaggattttttgtgtcagcatttacatataatacttgcttgttaaaatatttattatccccaggaataaaagtctctaaaaccaaatgtcctttggataactttactttcatctcctcattttgaagatagttttttataaagtctcctacaaaaagatattgattattttttcctgtattaggtaactccactacatcactaatctttggatttttaactaatattttatcaccttgatattctatacttttcccttttaaatgttttggggaaattacttctaatttatagttatcggtttttttataagtatgaattaaaacataattgtgtgggcttttatttccaactacttctacttcagctttacaactgtaataattcatatcagaaatctgcttttgaaaatctttgtatacttcttcttttgtggactgtcgtttttggcatcctattacaattataaccagtgccaagaacataatacatactatggtccacttttttctcacatcacacctcctacttcagtttattcattgtataaagcttttattatatcatatctacaaattatacctttaagtttgttgtcatcatctactacaggaactctgtttattgattttttaatcattacattagctacatcatcaaacttatcatcttcatgaacctttattatatctttagacataagttctccaaccttataagcagctacttgttttatatctttttcaactttttttaagtcatctaagaaaatcaatccttgtaatagatttatatagagaggtgcttctatatatttttcttttttaagaatatctgtttcagaaattattccaacaactctattctctgaatctacaactggcagacctcctattttttctgcaattagcatattagctacatctgctatactatcatcttgttttgctactattacatctgttgtcattatttcttttgctgttttatccatcataatgtaatcactccttagtccttaattatggttatcgcatttgctatagcataatcttttgaatgtgatattgaaacttttatttctaaaacattataatctatgcacatttttgctagattattataagtttttactattggttttcccatttcatttctgagaacttctatatctttaaaattaaacaatctaattcctgtacctatagatttacttatagcttccttggctgcgaaattacctgctatactttctgctttaaaattcttagaattaaaatactctatttctctatctgtaaatatcttctccaaaaacctattatttttgtctacagcctttcttattctatcaatttcaattatatctacgccaatatcaaatatattcattgttcctccagaaaatttataatacttctttcaataattaataatgaatttataaatttactatcgataatacacattattatttagtttatgttacttatcttaatttaataatcattataataaaactgtaacttttaaaattatttgtaatgaatattatatacaaatctattatattatttattatactacacaactaagcaaattttttaaattttataaaaattttatatgtatttcttatatgaagactttttcacttacataaaagctatctaaatcttctttatcttattaattacaacataatttggcagtaaatttaaacattttgtgaatttattatcactaaaaacttacaattttatcgttattttattaacaccaaaacacaaaaaagccattttacccaaaagtttttttggtcaaaatgactttttatactctaaattaatttattaaatccactcagcagattctgtcaatatgacagttttatcttgagttacattaatgaatccttctgctattttcgcctctttaaaacttccctctttttttatctttaaagttcctacaggtatacctgaaacaaatggtatatgacctttcaacacccctttgtctccttttgtagttctaactactatcatttcaacatctccatcataaaaagtattacttggagttacaactttcaatgaaaattcactggccatgactacatacttcccttcgcttttctaacagcgtcttctattgttcctacaaataagaatgctgactctggtaagtcatcatgtttcccttcaagaatttctttaaatcctcttacagtctctttaacaggaacatattgacctggatttcctgtaaattgctcagcaactgtgaatgattgagataagaatctttgtatctttctagcacgtgcaactattaacttatcttcatcagataattcatccataccaagtatagcaattatatcttgaagttctttatatctttgaagtattgattgtacacctctagctacttcataatgttcttttcctactatactagggtcaagaatccttgatgtagattcaagagggtcaactgctggatatatacccagtgatgatatttgtcttgataaaactgtttttgcatctaagtgagagaatgttgtagctggtgctgggtcagttaagtcatctgctggtacatatactgcttgaacagatgttattgaacctttcttagttgatgttattctctcttgaagtgcacccatttcagtagctaatgttggctgataaccaacagctgatggcatacgtcctagaagtgctgaaacttctgaaccagcttgtgtgaaacggaatatattatcaacgaaaagtaaaacgtcttgtccttgctcatctctaaaatgttctgccattgtaagtccagttaaagcaactctcattctcgctccaggtggttcattcatttgaccaaatactagagctgttttatttataactccagactcactcatttcgccataaaggtcgttaccttctcttgttctttctcctactcctgaaaatacagaaataccaccatgttgcttagcaatattgtttataagctcttgtattagaactgtctttcctactcctgctcctccaaatagacctatttttccaccttttagatatggagctagtaagtcaactaccttaataccagtttctagtatctctgctgtagtttctagttcatcatacgccggtgctggtctatgtataggtaatttaggtgcagattttggagctggtttcccatcaactggttttccaagaacattgaatattctacctaaagtctcatctccaacagggacacttattggccctcctgtatctacaacttccatacctcttacaagtccgtccgttgcactcatagctatacatcttacagtatcatcacctatatgttgagcaacttctgcaactatttctttatctcctaactttattactaacgcatttaataagttaggtaggctttgttcactatcaaacttaacatctagtacagctcctacaatctgtactactttacctacatttgccatttcctaacctccctattttagagcttcaactccaccaactatctctgttatttcttgagttacagctgactgtcttgctctgttataacttaactctaaattagatagcatttcattcgcattgtctgtggctgattccattgcagttcttctagcaccttgctctgatgcaaaagattccaaaattccaccatatactgtacctgatataaactgaggtacaatataacttaaaactgcttctgctgatggtatatattgtacttttgatctattttgtttttcttcttttactgccattccttgttcgtctgtatctttttcaaagactaatggaagcaatttcaaaatttcaacttcttgtgataaagcagatttaaattttgtataagcaatataaacttcatctacttcaccttttttatacaggtcaataatagtttgtgaaatttctgtcgcatcttcatatccacaagcttcaacactatttatatcttttgctatattgtagtttcttttagaaaaaaattcatgtgctttctttccaacagtaatcactgtttcctttttacctttcatatgagagacagattcctttaatacattggaattgtatccacctgcaagtcctctgtctccagctactactacataacatttattttttacttctctttcttttaaaaattcatttctaattccacgtgttgtttgggcaatatcttttactgtattgtataaagtattaaaatattctcttgaatcttcagccttttcttttgcttttctaagcttagaagatgcaactaattccattgctttagttatttgctttgtactttcaacagttcccatacgtgttttgattgctttgattccagctcctgccaattaatttacctccttttttaaaaaggattatacttcaacaacaaacttttctttaaattcatttattgcatctgttaaatcatgagtgaagtcttctccacctaatatttttcttgatatttccggataattattatctacaaatgcatacaattctgattcaaatctagctatattatctatcggaatatcctctaaatgattatttataacagcatatattatcataacttgattttcaacttttattggttgatgctcaccttgttttaatatctcaacgattctttcaccttgagcaagtctctttttagtatcttcatctaagtcagaaccaaactgtgagaatgctgcaagttctctatattgtgaatatgcaagttttaatgttcctgcaacttttttcattgctttaatttgcgcagaaccaccaacccttgatactgatataccagggtcaactgctggtcttacacctgaatagaataactctggttgtaagtatatttgaccatctgttatagatataacatttgttggtatatatgcagaaacgtcaccagcttgagtttctattataggcaaggcagtcattgaacctccacccaattcatcagataacttagctgctctttcaagtaatcttgaatgtaaatagaatacatctccaggatatgcctcacgtcctggtggtcttctaagtaacaatgacatttctctatatgcaacagcttgtttacttaaatcatcatacactataagtacatgtttcccattgtacataaattcttcacccatagctgctccagcatatggtgctatatattgaagtggtgctgattcagatgctgttgctgaaactactattgtataatccaaagctccacctttttctaaagagctaactaattgagctatagtagaacgtttttgtccaattgctacatatatacagataacatcttttcctttttgatttagtatagtgtcaataactatagatgttttaccagtttgtctgtcacctattattaactctctttgacctctaccaattggtatcattgaatctattgatttgattcctgtttgtaatggttcataaacagaccttctatctattataccaggtgcctcagattcaactggtctagtttttgtgtacgctataggtccttttccatctattggctgacctagtgagtttacaactctacctattaaagcttctccaactggaacttcaactattcttccagttctcttaactatatcgccttcttttatttcactgtcatctccaaggataacagctccaactacttcttcttccaagttaagtgccataccatatatttcacctgggaactctagcaactcaccagacatagctttttctaatccatatacactcgctataccatccccaactgttaaaacactacctgtatctgtcaactcaactttattctcataattttttatttgctgtttaattatagaacttatttcttcaggttttaagttcatgggttcaccgccattcttaagatattacttcagatagcttttctttcatcttatcaagacgagttttcacagtgccatctatttgttcatttccaattctaactagaactccccctagtatagtcttgtcaacaacattttctatagtaacatttttgttgtatttatttgaaagtttgacttcaagttctttaatatctgtttcactcattggaatagcacttattgctactccatcaattacattgtttttcttatttaataattctttataagctaattcgatatcttctaaatatgatattctatctttatctactaaaacttttaaaaagttttttatgttagaacttacttccttactaaaaataatttctaccaagtttttcttttctgattttgaaactaatggtgattttaaaactttgtagaaatctttactaactttagtcatcatatctactactttttctagttctttgaataagacatcagttgaattttcttcttctcctaattgaaatagggcttcggcatatctatttgctattacatttatcatttagcttcccctacctcttttataaagttttctatcaattcttcatgtttagatttatctaaatctttttcaataactttagatgctgcaagtagtgctatgttagatatatcatttttgatttcatttataaccttttgtctttcttgttctatatctttgtttgctttttcttttatatcaagagcatctttctttgcagtatttactatatcatctgatttctgctctgctcttatagttgcttgttttatgatttcttgaccttcatccttggcaaaattgatttttgactcatattcttttttcagagctaaaccttcattttttgctttttcgccttctgccaaatcacttttaatatcattttctcttgattcaattatatttaatactggcttgaataaaagctttctcagaagtaaaaatattataaaagtattaacaatttggaacacaaattcccacgttatacctactagtgctttttccataattatcctcctttccataaatcataactacttataatcacgagatgataaagttcatctcatgattataagtttgagatgatttacctataaacctatctcaaaatatttaaggactaaatctacattcctaagtatttaaagaatggatttacgaatagaagtattattgatataaccaaaccatatattgctgaagactctgctatagcaactcctagtaataaagttgatgttatatcacctttagcttctggttggtttcctactgcttctgcagctttagctgctgctataccttgacctatacctgcacctatacctgttgcaactgctatccctgctcctattgctgatgctgccgctactattgctgtttccataattatttcctccttaaaactttaattttttaaattattttatttttatcttaatataagttgatttcttaatctaactctcctgcacttgatataaataccattgttaacattataaatatatatgcttgtaacaatcctgcaaataagtcaaagtacaagtgtaatgggactggtattaatatttctccaattggtattgataatcctggtattaaactagatataaaacctaaaagttgataaaacagacccattattattgttccacctaaaatattcccaaatggacggaaacttaatgatattggtctagctaactcacctataatattgattggtaacattatggcaagtggttgagccaattctttaaagtatgataaccccttaaatttaactcctgcaaaataaatcataaaaaatgtaatcattgcccatgcagcagttgtgtctaagtcggttgttggtgaccttaatccaagtaatgggcttaaatttgaacatgcgaaaaataaaaacaagcttcctatgtatggtatcatatatggcattctttttactgtatttttacccataacatctgtaaccattttagcaagaccacctactgcaaattctaagaatatttgaactttactagttggaactttttttaagtttctagtcaaaaaataagatgctatcgctaaaaaggccattattccccaacttactagtattgtttcactaatcttaaagtttcctatgagataataatgcgcttgattcatacttatgcctccttcctctttaatttatttataaagttttttgataatatgacaaactttgtgctcaataatcccaatgctgttccgattatatttaaatgtggtactgtagctgatgcaattagaacaactgccattataaataatctaatagcatattgtgctgatgcataagcttgtgccttcccagcaggaaatgtcactgatttttccagtgatatcgccaataatctaaaatttaacatagctattatagagccaaatataagtcctaataatactggtttacttaatgttgatgttatcaacattagcacaattaaaactacatcaaatattactataccttttgttactgaccttacctggttaagtaattttatatccaatatatcacttccttcgtgtatatactattagagttttataaacaccactaaaagcacctccaacacccaacaataaaaatattattgtcagaactggagtagtattcaatttactatctaaaaattttcctaagaaagtacatcctaatattgatattacaatcatcaatcctatttgacttattaaactaaacaactttgcaatttctgtatgtgtatttcttttactcataaatagtatccctcattattataaaataaataacatgtaattaatctatctcataaatttatttaattataaaatatatcttactactaatctgatgatttttcaaatactttcttttaatcatttgataccattgtatttcagtgtcataatttgacatttattgtcatataaattttatccactaaaattttatgagttctattcctgcttcttttaataattctgtagacatatcatctggataatcaccttcataaacaattttcaatatacctgcatttatgcacatttttgcacacaaaacacaaggtcttgtagtaacatacaaagttgccccatctacactaataccattatgagcagcttgtattatcgcattttgttcagcatgtaatgctctgcataattcatgcctttctcctgagggaatatttaattcctgcctcttacatccaatattttcacagtgttcaagatttctcggagaaccattatatccagttgttaatatttgtttgtctcttacaattacagctcctacttgtcttctaatacaagttgaacgctttttcactacttctgcaatttccatgaagtattcatcccatgatggtctcataatttacttttctcctctttgcttatgtactggtattatatatttattagatttcaacctaaataaatacttatttttatattatatacacatgttaattgaatgtccaataaaaaaagagcatttttaccatttaaattttaaatacccgtcatatgctctctttaatctattaaatttattatatcatcttaataaaatattaatagctttatctaatataaattaattttggggataaatcccattgtttagtatggcttctaaaacccctccagctatacatctagctttatctgatattgtaaaagcattcttaacttcttcttttctagggtctatgtctagtatttttaaatttttgttcacctttgctccatcctttaataaacctctaaggactccagatattgttgctctaacttcatgttttttttcataattattaatataacaaagtaggtctcccttttcaactatatcacctatcttacatacattttccattataccatcatactgtgaatgcataactctctctttagaaaaaccttttattgctcctggtactcctgtatttttttctgctctaccattagttattattcttcctagattatgacctctcattgtctctataacaacatctacatcttctcctgcacaaaatccaggacctaaagctattgtaagtggtgccatatctttagttgtacctaagtttttcttagcgagtattccatcaaccaaaacgattggatttaacttagataatttttctccttttgggtctataatcaaggctactttatgttgagataaaacttcttctatttctttttcagtattgcaaaatatacattctacaccttcaacagttacttttttttcataaacagcctcacaaaaagaaatttgccttcttatagctaatggctcttctatttctaacgcaactactttaaaaccactgttgtgtaatttatgaataactgctgttgctaaatctccagcccctcttactgctatacaattcttcatgtattaccactcccaataatattattaatattcaattctcaatttaactaatacacttaatacctataatcttaatcgtaagcaactaacatgccacattaaaatagactactattctataaaaccttgtaaaataagcaatcttttttaattggtaaaaactttttattctcaattcgagaaatttatcaattcataattcctattttgagaaaaaatatataaaaaagaaccttcttacataaaattatatacactatataagaaagtccctaataaatatttatagttatttatttttatttagttccaaacaatctatctccagcatcaccaagaccaggaattatatatccatgttcatttaatctttcgtcaactgatgcaacatatatatcaacatcatcatgatatttttgcacttctgctataccttctggtgcagctactaaattagctaattttatacttttagctcctttagacttaagtaaatctatagctgctacagcagaaccccctgttgcaagcatagggtcaactactattatatctctttctcctatgtcttgaggaagcttgcaataatattcaactggttttaatgtttctgggtctctatatagtcctacatgtccaacttttgctgctggcattaagcttactaatccatctaccattccaagacctgctcttaaaattggaattattgctaattttttacctgcaactactttagatgatgttttttgaataggagtttctatttctacatcttttaatggtatatcttttgttatttcataccccattaacattgcaatttcagttaaaagctctctaaagtctttagaaccagtatttttatctctcattaaagttaatttatgttgtattaatggatggtttgtctctaccactttgctcattttgataattcctcctgataaaactgtaatttttattatttattatgtttttcttctattgatttaatcatgtttactcttctagcatgtctatcaccttcaaaatccgtattaatccatgcttcaactatctcaagtgctagaccttttcctaaaactctttcgcctaatgataacatatttgcatcattatgtgcttttgacatttttgcagaaaatacatctgatacaactgcacatcttatcccaggaaccttattagcagctaaagatattcctatccctgtaccacaacataatattccataatctacttctttatttataactgaatttgcaactatttctccataaacaggataatcaacagaatctgtagcattattagttccataatctacacattctatacctttactttctaaatagcttattatttctttttttaaattatatcctccatggtcacagcctaatcctatcttcatttgtttatcctccgtttcatattttttttactatttcgttgacagaatacattatttctctcatagtgcttctataaatatccaaatttccaccaaatgggtcagatatatcttcctcatttttatttgcaaaccctttaaaagtatacactttttctttgcattttggaactgcttgtactaaaatttctttatgagatttagtcattgttagtattatatctgattcatcaattaattttttagtaattactttacttctatgatttgataagtctataccgatttcttttagtacttctatagaattttcagaagcacccattccatttgctgtagatatacctgctgatgatatcgaatattcttcaatacttcttccagattctttaattgctttccttagtatagcctcagccatagggcttctacaagtattacctgtacacacaataagtatattcatattttacaactccctcttaagcctttatcactttgtatcctgctgacttcagtagtctattcataattgcttgtccaactccagtcttagggaactcttctgaatatatgacatcaacgccctttttgtccatttctataagagcatcaaacagattacttgcaacttcttcaagagagtttcctaaatcgattacttctccatcataaaactctcggtttctactgatacacattacacctgtctttagacctttgtctctattagattttatcatatcattaatctttgttgctacattttctctttttccagatattatatatacatctgcatttggagaataatgtttatatttcattccaggagctttagctttttgattatcttcttttttacttaatgatgggtcaagctttacttctccaagaagttcctctaaaacttctttagttatacttcctggtctcagtatcataggagtctcttctgttaaatccaatacagttgactccaatccaaaattactgtctcctcctaaaactattccatccactcttccattcatctcttcatatacatgttttgcttttgttggagatgggcgacctgagatatttgcagaaggagctgcaataggtataccagcttcttttattattgccctggcaataacattagaaggcatccttattgcaactgtatcaagccctccactagttttgtatggaattatatcttttttatttaatataattgttataggtcctggccaaagcttttctataacaagtttagctttatcacttatatctttggctaagtcatatacttcttctttttcatatatatggactatcaatggattgtcactaggtcttcctttagcttcataaatcttctttactgcattttcatctaatgcatttgcacccaacccatatactgtctcagttggaaaaataactgttttaccttctctaagaagttttgcttgtatttttatttcctcataatcaatattatttatatcaatattacttataatagttttcatcttttgtatgcctgctttcattttaattttatatataatttacaatcattgtacctaacaagaaaccaattatacaatacacactttttgaatgtggaaaaatttcttccaatacaacatacatcatagtacctcctgctgtagcaagaaatactcctataagagaagtaaatactcctccaaaataaacacctaaaaaacttcctagacccataggtaatccagctattacagtaaacaaaataactttacttagtttcattttattgcaaactaagcctaatgccatagctaacccttctggtatattatgtagacctataactatagcaagtgtaatacctaaactttcagttgacataaaagaagaaccaatggctagtccttctggtaaattatgtagtaatatacttatgaatataagatatccagatgccatatttccagacacatctaattttgtttttatgtacatagttatgagagctccaacaaacgtaaatataactgtattgattatccccattttgtccatggattctttcattaaatcaaacaccactacagccaacattattccaccagataatcccataaaaaaacttagatatttatcgacctctcttttaaaaatggctgatattactcctcctaatcctgtccctataacacctgccaaaagcccaattattgttacttttagtatcatataaccctcctatacttgtatataacaattatatacaatagaatatgataacatgacctaaaatgcaaaatagctgtttcaaaatagaaaataatttctaggaagaaacagcttctttaaaacattacttatattgcagtcattttttctgtttggtcaacagtaattaaagcatctatcatttcatctatatctccatctaaaaatgcatctaacttatataaagttaaatttattctatggtcacttattctaccttgagggaaattatatgttcttattctttctgacctgtctcctgttccgacttggctttttctttctgctgctatatctttgtgttgttctgccaatgctttatcgtaaagtctagcttttaatatttttaaagcttgctctttattttttaattgtgattttccatcttgacaagatactacttcacctgtaggtatatgtgttaccctaacagcagagtcagtagtattgacactttgtcctccattacccgaagaacggaaaacatctattcttaaatcatttggatttatttcaacctctacatcttcaacttctggtaatactgcaacagtagaagttgatgtgtgtattcttccaccagattcagttgatggtattctttgaactctatgaactccagattcatactttaatcttgaataagcacctttaccttttatcataaaagatacttctttatatccaccaactccagtatcacttgcactcaataattctattttccatcttcttctttcagcataccttgagtacattctaaataaatcacccgcaaatagagctgcttcatctcctccagctccacctctaatttcaactataacgttcttatcatcattagggtctttaggcaataatagtatttttatttcttcctccagaggtgctactttttcttccatctcagctaactccattttagctaattctcttaattcttcatctgactcttcttgtaaaatttcttttgattcttttatactatctaaaacgcttttatactctctgtatttcataacaataggttccaagtcagcatgttcttttatatatttctgccaaactttttgatcatttattacatccggatcacctattttttcacttaagtctttatatgtatcttccaatacctctaatttttttaacatactttcacctcgattaaatgtaacatatcaattgttgattatatcatatattgtaacctataacaactctatcaatgccttgaatatccttctttgtgtatatttttttatatccattacttttcataatatttattacatcttcagcttgattatgaccaacttcatatgctaatattccacacttatttaaatatttcttaccttgttctgttattcttctataaaagtctaatccatcttctccaccttcaagagcattatatggttcataatctttaacttgtttgtgcagagtttctatatcttgttttttaatatatggtggatttgaaactatgatatcgaattttatgttactatcacttattgctgtaaataaatcagaattaatatactttattttttcaccaacttcatttataatagcattttttttagctatttctaatgctgtctctgatatatcaaaagacatgattttagaattttcaatgtactttgctaaacttattgtaatagctccagaaccagttcctatatctaatatacttacatcttttttttctctacatatttcaattatttcttctactaaagtttctgtatctggtcttggaatcaatacgccttccttaacaaaaaaatctaatcccataaactccctattttcaactatatatgctattggtcttccatttaatctttcttctgcaaaacccataaattttgttttttgttcttcagttagctctttattcagatttaagtgaatatataatctatcaacacccaatgttttttgtaacaataactctgtatctaatcttggagtatcacttatatcttttagtttatctgaatatttaataattatatcttttatcgtcataacaaatatccttttctctaatctactactgctttcaatgcttccaaagcaacctctaattgctcatcatcaggctcttttgttgtaaaatattgcaacatcattcctggatatgcaataattttagtaaatccattatcatatttcccaagaactctaattacctcataagataaacctgctactataggcacacatataattctcataaatattctaagaattggatttggccaaccaaaaaatgcaaacaatattattgatacagccataactataaataggaaatttgtaccacatctaggatgtaatcttttaaattttctagcattctctactgtaagttctaaatcattttcatagcaatatatagatttatgttctgctccatgatattgaaagactctttctatatccttacttcgtgaaatcaatactatatatgcaaataatatagctatccttatgattccttctattaaattaagcataaaatcattaggcattactttagaaaaagctcctcctaccaatgtaggtataaaaatgaataatccagcagaaagtaacattgctatgaccaatgaaaatattataattatatcatttgccttatctttaaaaattttctttataaataaatcaaatttatcctcttcagcttcttccataaaaaactctgaagaaaagtttaaactttttatcccttgaatcattgtatctatcataacaaaagaacctctaacaaaaggtatcttatctatattcttatctcttacccaactttttattctatcttcttttagtgctatttctccgtcactttttctaacagctaccgctcttttgtcttttgactgcatcattacaccttcaataacagcttgcccacctacagcttgttttgccatccactcacctcattttattgtatttagaatactcaattttacatatttattattataatacaaaaagacaatttaaagtagaatatgaatgtttttttgtaataaaataggagttggcttcctccaactccacttttataaaaattagtccattttgaatcttttcttgaatttgtcgattcttccacctttttctatgttcttttgttttcctgtatagaatggatggcactctgaacatatttcaacttttatttcgtccttagttgaaccagcaacaaatgtgttcccacaagcacaacgcacttcaactggattgtattttggttgtatttccttttgcattatagtcacctcttctctttatttaaaaaaattaattatattaactttctttttacattatcaactacattattatagcacaacttattatgccattcaagtgatttttctattagtttatataatccatatttgcatttgtattattgattttacaaattctttattgattttacaaactctttattgtccttagttctctttataagttcaatgactttatctgtaatttccattactgaattattactcatttctcttcttaatctccaaagagcagtcttttcttcatcatcaagcaataaatcatctcttcttgtaccagacttgtaaatatctattgcagggaatattcttttttctgctaattttctatctaaatgtagctccatatttcctgtacctttaaattcctcaaatattacatcatccatcctagaaccagtttcaaccaatgctgttcctaatattgtcaaagaaccaccctgtctaatattccttgctgcaccaaagaactttttaggtccatgaagtgcaccagggtcaatacctccagataaagttctacctgtaggagatattgtaaggttatatgcccttgccaatctagttatactatctagtaaaattactacatctttaccatgttcaactaatctttgagctctatttaacaccatctctgcaaccttgacatgatgacttgatacttggtcaaaagttgaatatataacgtctccttcaatagattctttcatatcagtaacttcctctggtctttcatctataaggagtactataagttcaacatttggatgatttttagctatgctatttgcaacgctttttaaaagaactgttttcccagcctttggaggtgctactatcaatcctctttgtccctttcctataggtgaaattaaatctataattcttgtagctatttcatttctattagtttccagtgtaagtcgttcttctggaaatattggtgttaatgtctcaaacgcatttctttgtatagctgtgtcagggttttcatcatttattttttgaacatataaaagtgctctaaatttctctccactttttggatgtctagttattcccttaatcttgtctcctgttttcatattaaatcttcttatttgagatggtgaaacataaacatctccttcagtagacaaataatttgaacctcttaaaaaaccaaatccatctggcagaatttcaagtacacctactacttcatcctcttttgatgtgttaaattcatctactatcttagattcatcaacttgtttaggcatataatagtttttattattatttctgaccattctattagatatatttgatgacttattactatcatttacactcgttgtcttattatagtcatttctttgatttctattttcttggttttgggaaatattttgggtatctatttctttcttgttgtatgatttggtagggctcttatattcaacttctttttctatactttcacgctctatattttcttttctattctttatgtcttctttaatatcttcatttttttctttagtctcttcgtttactttttcctcatttttacttttggaatttataatctcaattaactcatttttcttatatgtagtaattgattttatttttaattctttagctatctctcgtagctcaactaaggtcttactacctaatccttctaatactttatcatctaaaatcaaaaaaatcctcctcatctatatattcatttatatacatacttattttggaaattgaaggcatgaaaaagaaaagttttatttaaacagttaagtctaataatatcattatttatatattatggtcaataaataaaatttaaaacattattacctactatattactgtatttcaagtccaatcttagcacgtttttataaatttatcactatatttatatcttataataatattttcctttaaaatatgcaactattataaaaatttttttttacatttataaattctaaaaaccatatataactaaaatattgtaagtttttgactacatcaagttatatatggtttttatatttatgtatatcaactgctgtcatttatcttattacatagttgcaatcatactcaaaacagctgttatactcgttattacgaggattcccacaatcccaacagctattattctattaattcttttctgacttgattttgccaccatacatcacctttcattaattatttttgaatttcaagttctctagcttcattgacttcaattaaatctattttttcatctgtattattgtataacacattgttatttttatcaaattcactacatacatgtttcaaatattttataaaatcttccttaaggtcttctttctttagagcaaagtcaacagtagcttctaaaaatcctagcttgtccccaacatcatatctcttgccttcaaaattgtatgcatacatagcttctttcttagataatatttttaaagcatctgtaagttgtacctctccacctttacctggtggtaaatccttaagaatatcaaagatttcaggagttattatatatctacctaaaatagcaatatttgaaggagcttttcctgactctggcttttctaccatgtcttttaccttgtaaactctaccttctatattttttgcttctattatcccatatttattagtatcttcttgatttaccttttgaacacccaatattgtagttctatattcctcatatgcatctgttagttgttttagacaaggtacatcattatctacaatatcatcccctaacattactgcaaacggctcatcacctataaaatgcctcgcacaataaattgcatctcccaatccttttggctctttttgtcttatataatgtatgttaatcatgttagatatgttttgtactacctccaacaattctttcttaccttttttctctaaatcaagttccaattctacagatttatcaaagtggtcttcaatagattttttatttctacctgttattattagtatttcctctattcctgaggccacagcttcttctattatgtattgtagagttggcttatcaactattggtaacatctcttttggttgtgcctttgtagctggcaaaaatctagttcctaaacctgctgctggtattacagcctttttaactttaacttgcatagaatcatctcccactaattaataaataaaaagtcctatcttgataggactttaaacttttagtatattttatcattaattcgatatatttaccatgtggattacaataatgtttataatagcttttcaagttctgctactaaactatcaaattttttgattgtattttctatgggttttgtattagttaaatttatgccacttgattttaacaagtttattggataatctgaacttccctttttaagaaagctcatatagttatctgaaccattctttaggatgtcttgggcaaaacttactcctgcactacaacctgtagcatatttatagacatagaaactattataaaaatgtgggattctagcccatccgaccttagataattggtctaattcatagctttgtccataatattttttaagaagttgtccccaaacatcatttaatactaatgcgtttacactttttcctttttctactaactcgtgtatagttttttcaaattcagcatacatagtttgtgtataaagagtatcttttatcaagtctaaatactgtgttatataataagctttttcatcattgcctttagcttcttttataagcatctcgtaaagtaatgcttcattcgttgtagatgcaacttcgtgagtaaatatagacggatttgaattaaaataattctgattcttagaacttaagtattcatatacagcatgtccaagctcatgtgataaagtcgaaactgaacctaatgaattattataatttaaaagtatatatggatgattttcataaacagataagcagtatccaccacttactttattttcatgtgaataaacatctatccatttttcattgaaagctttatatactacatcattgtattcttttcctaaaggtgacaacgctgaatatactatactttgtgccttttcataattaatattattatcaacagccttaaccataggcacaaacatatcatatgaatgaaccttatctaattttaatactttttttcttaaatctatatatttgtgtagactgtccatattactatttacagtccttatcaaattattgtatactttttcatctacattatcagattccaagtacatttctaaagaagactcataacctctttcctgagaataaaaaatattctttttaacttgaccagtaattaaacctgcaattgtatttatattatcattgtaagttataagttcatcttgataagctttttttctattttctctatctactgactctaattcacttgcatattgcgctggtgtcaaattagtttttctatccatatttctaaataattcatatacttggcttggaagactacttattgaagatactttgcttagaatatcttctgatttatcatccaaataatgtactttattccttcttatatctcttaaatatgcaccatatttcctatttatatttttatttgaaataattttcttgtaatctttgtttgataattttagtatttctaattctaaatctgaacaaatccccatataattcccatatgatttactcatactatcactcatatctaagtacttatatgaatttttattagtatcttgttttaattttacataggcagaaagtttatttagtcttatatcaagtttttccttaatgtttaaggcaaaagacaaatgtgttggcgattttgttactttacctatgtaatttttcaactctttagtatctttatcaaaactcttaagttcttttttccattggtcatcacttttgaacaaagattgcaaattccaacatgttttttcatagtctacttcttgttttttttcagcatcatcttcagtatcattattattcatgacagcaattgctctgtcattattcttttgatatccttggtcagcttttatacttattattaacatgcaaaaaatagaaataaataaaggtattattgctttgcacaattttctattcataaaaagccatcctttcaataaatttacttaataataggatggctttttttagatatattattcaattattcatactatataaataaatatcgaattaatagttatccacataataatcaacatattcacaggttttctttacttagaaatttagttatttcaacatgaatctcttttgataatagcttttgttttttctttttttacattttattaacatttctgccatacttatcaacaaattttgttgatttatatgttatttttgttaataactatacttttttcaaaagtctattaacatattatacacaagttatccacatcttatacacataatcttgtaaaccttattttgtacatattttcgtaactaaaacagtcatgtcatcttcgatttgtaacgcttgtaactctaatgctctatccaatattaaatttgaaatttcctttggatttgtagtctctatattctttaagaagtatattaaccaattgtctcctaaattgttatttcttcctgcatctacaattccatcagaaaccattataacatagtctccttccttaacttttacattttttctatcaatttttacatctgataatatacccacaggtaatgatgatgatgatattaagtcaacttctccatcctctctttttatataagtagaacacgctcccatctttatagtttctaaacaacctcgttttaaatctaaaattcccaaatccagagttgaaaacatctcttctgaagattttaacaacaacatattatttatagtatcaatgactatctcatctttaatttttgcatctatcattttttccagtatatcaatagtggcagaagattcttcatatgcttttttaccctttcccataccatcacttatagccatcatgtatttaccatcatttatctccatgtatgtgtaattgtctccacaaaggatatgcccatcccttgacattgctgaaacttctgtaacagccttatatttttgagatttaacgaatgttgccttgcatttacctcctaaacagtgacatcctatttttctaacagacatattttcacctactaggtctgaaattatatttacaattttatcttcacacatacatccatcatgacaagttttcttttctattgatatttcaaactcattgttactttttgttaagtaacttactttatcaactgttatatcatatctttctaactgttcatatatatttttttccttttctatatctagcattatgtcaccttctaaatcttgagataaggatttaatggattttgaaatacttcttatctgatttgctattaactttctactttctgaaaacttcacactccaatcataatctaatacaaacattttgtaatagtgatttgatattttcactatcgactctggtttcatacattcctttctaaaatttttaggtatatcgtttagacttaactcccctttctcctcaattttttcaagaatgttatatatcatagtgtatgtatgattaaatcttgactcccagcacattcttctcatactacaacttttacattcatcattatgaatcatatctattacattagctatatctctttggtctagcactttgtctttttctcttatcttatcaaatgtatctgcaaggtcatcataagttttataaatactgttcaatctgctattagttaggtttttgcttctcataatataatcgtatacgatttcatttgaagccacattactttttattaatttttcaatcttattaaataatctctctggcaatactagtactatcaaacaacctaatagtatatctcttaattgcatcatattagaagtaataccagaagtatataggtatattattgtccaacttagaatatatcctagtatacagaaatatttatttattttattaaatgctccacttattaatcctgaaaaagaatatatccccatataaacagctgatgtcatattatttaaaatggatgctacaccaataattacaccactagatgctcccatggtagctccacctactattgaggtcagcaatatcaatacggtcgataaaatggtccttattgatattccaaacagagatatatctcctattcccattatgctaaaggttagcagtaaacttattgatatagcttcttctgtccgtacagacatcctattgttgacattggccattaaacctatcccataagaaaacacatatatagatataaacattattattgcttctactcctgctataagaagaccatatacatacctatttgaaaagaaagcttgtcccatggagattggaagtagtattattgcacctataaatgcaaccttagcaattgaatctgataattttaattttttattcatagccataaatattgtaaggcacacagcatattttgctacatttccaaaatcattagatgataacaatattcctaataatgttgatatgaatacaggtatcttgtacttatcaatctttgatgcacatataaaaaaggcaattcctaaaggagctacagagtctactataatagacctactaagtaaaaatcccatcacagcgaatgccgccgtagtaaaatcaatatatccgcttattaattttatgacatttggttttacagtcttattcttcacaactgctacacttctttgcataaaaaaacctcctcttttgtttatattaagaattgtaacaaagaggagtaattttttttgtcataatcggttttaaaaatcaaaaaatattaatacattttttttgacttttgacatattaagccttccaaattatcgtattcacttacggttatttcttctatttctaatttttccattattatattcaatatttttacaccagcagttataatatccgcacgtttttcttgtagcccttttaagttctttttatcacttaatgtcatctttattaatttttgtagaatttcttctatttcttttttgtgtattttactattatgtattttttccatagagtaaatctctaattcttgattcattgctgataatgatgtaatcgtacctcctatacctataagagtttttaatcctctgtcttttatatgatttaacgttttgtcaatctcatcatatataaatgaactcatagcttcaaactcttcatcttcaataatatcgtgcttcaaaaacctctctgtcatcctaagagcacctacattctcacttttattaaatttaattccttctgaatcacctacaataaattctgttgaacctcctccaatatctataacaataatagtatcatcaccttgtattccttctaaaacacccttaaagcccaaatttgattcttctattcccgtaactatatcaacatctattccagtttcttctttagctaatttaacaaagtaatctccatttttactgtctctaagagcagatgtccccatacaataaattttttcacacttttcatcattacacttatcagaaaattcttttaatgcttttatatttcttttgatagcatcttcttttatatatcctttactatccacaccataaccgattctagttgtattaacaaatttttttctgtttataaaattcccatctctataatctgctatcagtaatctcattgagtttgtcccaatatctatagctcctactttcattatgaaattccctcctcaataaaaacaaaaagccatccttaactgaatgacttttttattaaatcttaaattttaaaatcaatacatctgtaaacttattagcaagttttaatcaacgatttatgtctacataaactgtttcatttggttttaccatattcaatctttttcttgctatatcctctaagtctccttcatatgatttttcatctttctttaagctgtttatttgtatttcagtcttttttaattgtttatttagacttgctatttcttttttatattccttagcttttgtatactcaaatacaaatcctgtcatcatactaaaaattgatattcctaaaaataaactgataacaataatctgtcctgaaaatttttttcttaagttcatttttcctacaccctttttttagttttattttttttcttcttaggttttgattttttcttgttctttaattttttatttgattttctttttatactttttcttgttgctataaatatgtttggtatataaaatataatatcaaatagtaggtgtagtgaatagattataacgtaatacaaattatttaaaaaactgactatgtaatgtgtaacttttttaaaagaatttctcacaaaacgaattattttattgataattgataaaacaattttacttatggtgttatagtataaaataaaaccaataaacaaagccacaaaatgataatatcttaaatcaaaaaattctgtaaggtttattgttacgaatattataaccgtagctagaaaccaaaacaatacatcaaagattatagcaaaataattgatgaatttaaaattccctcttagccctctataaaaatcaaacaacacccctatgagtattccaccataaatagtagcataaaaaatgcttacatcttgagtaaaaggtatcatctatctaaatacctttttcaagaaactctcttgtggctttttaggctttgcatataccatagaatttatagttccatctatgctaattatattttcgtctatacttagcttgctcatatctaggttttcgccttcaattaccatctcgcctacagaagttttgagctctactcttttgtcattaaaagagtatatgtgctcgactcccgaaataaccagctttgatctatctttcaaagttatgttctgttccataatatccccccagtaaatatttcaataatactactattaatatactagaggactattaattttattctaaaatttcgtacatttcttttgcatcattttttaatacatgctcttttacttcatttatcttaaacttcatcttcttctctccaaattgtatttctaatgtatctccaatattcacctctgaagaagatttagcaacttttccatttatagtgacaatccctttatcacatgcatctttagcaacagttcttctttttataatcctagatacttttaaaaatttatctaatctcataattatcaccttccttggttctatagaaaaagtgtggcaaatttatccacactttttcacaagatttctaattatccatttattatatcctttaatccttttccagctttgaaaactggtgctttagaagctggtatatctataacttgctctggatctcttggatttcttccttgtctagcagctctttctcttgtctcaaatgttccaaatccaactaattgaactttttcattatttactagtgcatcttgaacagaactcataaatgcgtttaacgcagcttctgcttccttctttgttaatccacttttttctgccatctttgatactaattcagctttattcacgatatttacctcctaaaaatgtttataatatagacttctatctttgtgataaaagttctagatttttgacaaatttccttccacaattttattgttttttagcctgattccaaaactcatccatctcttcaagtgtcatgtcttctaattttttattcaagttcattgcacttttttctataaagtcaaatctatttatgaatttttctgtagtacagttcaaggcttctcctgagtctatgtctaaaaatctagctagatttactatcgaaaataataaatcgcctagctcttcctttatgtattttatattcccgaccctgtgttcgtcaagtaattcctgatattcttcttcaatttttttaaatacatcttctacattgtcccaatcaaagccgacaagtgctgctttatgttgaactttactagccttcataagagctggtaaatgttttggtatccttctaaggccatctgttatagtactttcgcctttctcttctttctttaattcttcccaagttttctcaaacttagacatatctaattttgcaccactaaatatatgaggatgtctatgaattaattttttacatatgccatttactacttcttttaaatcaaagtagccctcctcatttcctatctgacaatggaatataacctgtaaaagaacatcacctaactcttctaccatttcatctatatcattattatcaattgcattacaaagttcatatgcttcctctataacagaattttttaatgattgatgtgtttgttttttatcccattcacatccagatggacttctaagtgtattaactattatttctaagtcatgtactgtattatacatctttttagaacttttgggtatatataagctagttaaatagtcaaaaaagttttcatttctgtctaattcacaaagctttataaactttttactttctaaatctttgacacctgctccatttactatacatacttcttgattatagtcataatgttccataagttttaactttacattagatgctataaatttatcatatacctgagttattatcatgcttgtatccaagtctatatatgaattttctatttcaaaagcatctaccagtttaaatccctcagatgggtctatagccaaatagttaaacatagcgtctacaaagctcatagaaggcaatatttctactgctatgtgcttttcattggctaatctctctattatacttacagtcttctctgcaactcttggatgaccaggaacagcatacactaggtcaccctttgctgattcttctatgataaattcagatattttcaaataaacattatcaaaattttcctctttttcataaaagtagtctaaagaagtgtattgtatagtttctttaagtttatcaattattggatgtttctctgttctaaaaaaaactttagggctatttattaaagattctaacacaccttggcttataagagaatagtctcctggtccaagacctacaatacttatcttacccataacatcactcctattagcaaatttcactttatttttatattattatacaaataaggagatttactatttgtatagtatttcctttatttgcatatatattcctatattatcttataagtttaactttttttaacaatttatataatttatcaccttttggcatagttagaatctcttcttttttaattccacctattccaagtattactactacatatacaattccaccaacacatattgcaattattgtagatatgctgtttcctaagaatccaactaaagcaccataactcaacttaaccattataaacattgtcataactgttataaatggctttattataaattcttttttagaaaagtttacattcatgtgttttttaacatatagtaagttaatcatggctgccacaaagtatgctgtaactgtaccaaatgctgaacccagtacattaatatctggtatacctgttaaagtataacttattacaattttacatagcataccaacacataaagcaattacaggtactattggttttcccattccctgaattataccagtcaatgtctgtattaatcctaaaaataatacacatggagtaagagtaaacaaaatagttcctacagaagatggttcatgtggaaataaaagacccattattggtattgctaaagaagccataccaaacgcacaaggcaatactataagtaaagttaccttaactgcactcttagtatcttttctagcttttgacttatttcctaatgcatatgctttagaaattgctggaactaagctcatactcattgcagttgttatgactgctggtaaatttattgtggccattgccatacctgttaattgaccaaacattgaatttgccactttgtatgtaaatcctgcttccataagtcttcttattacaataacattatctatcatatttacaagtggcattactgatgctcctattgttataggaatggcaacagttaaaagctttttaaaaatataagacactctttcatctttaaatctttggcttgcatctatctctgctctacgctcttttctccctagcatataagcaaacaccaaataaagcatagatgctattgaacctattgtagcccctgatatagcacctgctgcaccaaaagtctgacctagactcttcataagcaagtaggccaaagtaagacctaatacaactctaaaaaattgctctgcaacttgagacacagcaatcttagtcatatcttgtctcccttgaaaatatcctctatatgcagacattgcaggaacaaatagtaatgctggagcaatggctttcatagagtataacgcacctggatttttcattacgtttgttactatgtagtcggctccaaaaaataatatacaaaatgatattataccggtaatgaataaaactgtatgtgataccttaaatatcttatttgcacctttaaaatttccaattgcaactttttccgaaaccaattttgccacagctgttggaaatccagcagtagctaatgttaaaaatagagtatacacaggataagcagcctgatagtatcccattccttctgaaccaatcatgtttccaaggggaatcctaaaaaatccacccattatttttacgattacacctgctagcccaagtataagggctccttttagaaaggagtctttatttttgttattgttcataacataacctccatactgtttatataacaaactttaatataccatatttttaatgctatattcaatattttacacaaaaacttcaaaagaccttcatgtaaaaggtctttatgataaaattattgaacttgttttcctaaaaagttagcagcaatttttaaagatttttcttcactttctgcaattgtatctttatcctttgaaacaactacaattgaacctatacagtcaccagatgcactaattataggcatgataacttgactagtatattctttttggtcttccttgaataatggtaaaatgtttttatcttttgaatattttactgttctttcacttattattgcttctaactcatcacttatacttttttctttataatcttttttaggaagcttagacacagctattatagaatctaagtctgttatcaacactccatatcctagtacttcagctaatgtttcagcatattcttgcgaaaattcatttaattcacctattggagagtattttttaagtatgacttctccatcttttgctgtgaatatctctaaagggtctccttctctaattcttaatgtctttcttatctcttttgggataactacccttccaagatcatctattcttctaactatacctgttgctttcatattttttaatccctccataaattactttaagtttatttttaccattgttaagaaaaatatacaaaaaaagctatatcttatccagatatagcttttttaagcatattactctttttttaagtcttagattgtgattttatttattactttttcatctttttctaccttagcttctttagttaatttttctatttgttcttgatatttatttttcaacagttggtcttttatagtttctttagcatcttcaaatgatgtttgctcatttattctgtctgtcactttaattatgtggtatccatattgagtttcaactaaatcagatacttcaccctttttcatagaaaaagcagcatcttcaaattcagcaaccatttgcccccttgaaaagaatcctaatttaccaccatcacttgctgaagtatcttgtgaatatttttttgctacttttgcaaaatcctcacctgatttaacttctttaagagcctcttcagcctttttcttagcttcagctttttccttatctgaaagtggcttgttattatcatctactgttttcaataaaatatgagaagcttctacctcatcttttttaaattcatctttatgtgtatcatagtattttttcatttcttcatctgatattttagtctttttagcaaagttactttgatagttttgcattgctaaatctttctcttgttggtctcttaaaaactcatcatctatacctaatttcttaagttgttctttatatttttcatctttacccatagcgtcttttaattctttaaaacttttttcaacatcctcttttttaggaagtaagttatcttttttagcttgagaatatattacttctgtagttataagttggtcaagaattaaatctttaaacttgtccttgtattttacacccttttcaacttccttatcccatatatcttttccataagtttgttccatagaatctttataaagagctatagtttttttaaattcatctgatgatatctttgtaccttcaactgttgccacagtttctcctttactagaactgcaagcagtcacagatactaccaaaatcatagctattaccaatgttattacttttttcaaatttaaaacatcccttcttaaatttacaagttattttaccttgcacatcttttctaataattcttctaattctgtaactatattataacctattttctgtttagttctatactttgttattggaactaataatatttcatcttttaattgtcttatcttttctatttttaatatcttacataacgattttatataagctattgtaagaagtgtctggactggtttaggtatatcagagaatctatcctcaagttcttcttgtatatccaacatgtcttctttgttttcaatagaagctattttcttatacatttcaattttaatcaactcatctttgatataattatctggaatgtatgcatttacacttaaatctatttcaacatcaatttcctccacaataggttcacctttgacttttttaattgcatcattaagcattttaacgtacaaatcataacctataactgccatatgaccatgttgttgagaacctaaaatatttcctgctcctcttatttcgaggtctctcattgctattttaaaaccagaaccaaactctgtaaattctctgatagcttttaatctcttctccgctatctcacttaaagttttatctttttcatacaaaagatatgcatatccttgtcttgaacttcttccaaccctacctctcaattggtaaagttgagccaatcccattttatctgcatcatatataatcattgtatttgcatttgatatgtccataccagtttcaattattgtagtacagactagtacatcataatctttatttaaaaatcctaggattatattttctaatgatttagaagtcattcttccatgtgcaacagccactctagcatctggtacgagtttttgaatcatacttgccatttcttcaatgtgttcaactctattgtatacaaaaaatacctgtccacctctacttaattctctctctatctcatcttgaattacgctttccttactctctgtaacatatgttattacaggatgtctttcttgtggaggttcttctataacactcatgtctcttattccacttaaagacatatgtaatgttcttggtataggagttgctgaaagtgtaagtacatctactgtagatttaattttctttaaagcttctttatgttttactccaaatctttgttcttcatcaatgactacaagacctaagtttggtaaatttatatctttggatattattctatgtgttccaattaaaatatctactaatccttttttagcatcttcaataatctgtttttgttgttttggtgttttaaacctacttaaaacttctactctcaaaggataattttcaaacctctctttgaatgtattataatgttgttgggccaatattgttgttggaaccaatacagcaacttgtttttggtccatacaagctttaaaaatacttctaatagctacctctgtttttccataaccaacatctccacatactagcctatccattaccttacttgattccatatcttttttagtttcttctatagcctttaattggtcttctgtttcttgatatggaaacaacgattcaaactctgcctgccaaggtgtatcttttgaaaacttatacccttgtattttttcacgttttgcataaagctcaatcaagtcttttgtcatatcttcaatttcttttttaacttttgcttttgctttcgtccactcatttgttccaagcttatttaacttaactttttctacttctgcaccaatatatttttgtactttgtccatctggtctattggcacatatagattatctccaccttgatatactattttcatataatcttttttaatagcattgactgtaatttgttcaatccctgtgtatctacctacaccactattttcatgaactacatagtctccaacacttaaatctaaaaaggattctattttctttccttttttaacttttttattgctagtcttagacgctcttttataaacacctatcatttcgttatctgttataacaacaaactttatagatttatactgaaaaccactgtttatgtgtgcaggtacaattataacttgtgaagatttaatttcaatatctctatctttagaaatggtcgtttctaagcctttgtccaataaatcttttcctaatttatttgctctttctaaggtatttgttgctaaaattattttgtatccattatatttcagccgatttaattcttctacaagcaaatctacctttccattaaatgtaggaacttctctactttcaaaatttattatagattttatagaaaagttatttatagactttggcaatagcgagtttaataccacagacttgtcttttactaagtactctaaatctgtatagtgatataacaatttaccttggtttttaatagccagacctctttcaagatttaatttataattttctctaaactcatttatataattttcgcatctttctttaagtctcgttatatcattaataaatactattgcatcatctgctaaataagtaaatatacttttgttttcttctggataaatataatctatatagttctctgcaccttcaaaataagtcttacttgatatataatctatattttgaaatgtaccttcatcagtatttttagttgtttctttttttaatttaactaatgcatctgtagttttttcgggataaataaattctctagatggagttatagagaattgttgcaatttatcaattgatttttgtgaatatacgtcaaaagttcgtatggaatctatctcatcatcaaataattccatacgaattggatttgtatattcaagtgaaaatacatcaataattccacctcttatactaaattgaccaaacccctctatttttgaaactctttcatatcccaatgaaactaatttctcagttaacttttctaagtctaagctatctcccaccttataatgagatacactatcgagcaaaacttgttttggtatgtattttcttaaaactgcctcaatagaagttactaaaatgattttttctttatttgctagttttaacaatacttttaatttctttgcttcttcgtttctgtcctttgcatccaagtgataaaaataaatatcttgaaaacctaaatattcaactttatcttccatataaaaacttaaatcttcgtatactttctttgcttctaaatcactactcgttataaaaatcatttgtcgtgataaatcattaaatatagaatacgatatatgaggtttttgtactggtaaaagtccattaaccaataatgagccttttgtattttttatacagtttattatatctttatactcttttgaattttgcaaaggatataaaaaaacatcattcatttaaatctccctctcactatccattatatttgttcatagacatatctatattttctcttattattgagtcaatagcatctgccgctttttctaatgcttcatttatgttatcagattcttcttttctaaatctagaaagtacaaagtctgctaagtcttgaccagcttctggtttagatacacctactctcactcttggaaagtcatttgaacctaggcacttagttatagatttcatgccattatgagttcctccacttcctttttttcttatacgtatctttccaacttctaaatctatatcatcatatactactactatattacttaaatcaaccttataatatttatatatatctattaatgtttctccacttaaattcatataagtttgtggtttaactaataatactttttcagtacctactctcccttcaccaatcaaagctttatgctttattttagtaacactaatattgtattctttagcaagaatatctataacatcaaatccaacgttatgtctagtcttctcatacttctttcctggattacctaaccctactactacgtacatttcttacctcctgttatataaatttgtataacaaattataataaaaattaaatatattatactctgtaaatattattaaaattgttgacaaggaaataaaaggtgtaaaaggaatttgctttcttatatctacatctttaaatattttagttatgtataaaataataaaaaacaaaaacgctaaaataaatgataaaactatcacataaaacccataattatttcccaatgcaaagcaacataagctatagagacctacatctccatagcctaatccttttgttagtttagcaataatataaggtataataaagcctatcaatagtccaaatatatgatttatataatcaaattgagctatattgaaaaaggccaaaaaaattataccttgaactattataccactaactattgttatatcatatacatatattgtgtagtaatctacaatggatataattattaaaaatggaattaaaaccatatattgtacacattctacactaatcccaaattttagatatattaatacagataaaactacagttattatgtaaataaaaaacgtattatataaatttttcttttctctatcacaaaaaacacatagagatttatttatcaaatgtgcaaaaaataaggaaattattattatatactccatagtttgtagcactttagtaatagggttaataataatattgtccttattaaatactttaattcatttttttaaattaaaactttatttaacttgactatcatctatataaccatagaaaaataaagttcaagtaattgctttccacataagattgttattaatgctccaatagatataaaaggtccatatggtataacagaattatattcctttccttttattctacttataattattacacagattccatagactgctcctacataaacgcttagtaaggctgtcaaaagaccatttttaacacccatgtaaaggcctagcattgcaaatagtttgatatctcctccacccatacactctttttttattacaaattcaatcaaaagaactataatccagacacttcctccacaaataaaaacacctagaattgaatccttaactggaatttctttaaataaaaggttaaaaatcatagaaaatatagctccaaaaatcaatattttatctggtattataaagtggtcaatatctataaatgtaattataatcagtaaagacacaagaaccaaataataaatagttgatgtagatattccatataacataaatactgttaaaaataaaattcctgtaattaattccactatagcatatctactagaaattttctcataacaatatctacactttctgccactcatcaaatagcttagcactggtattaagtctattggctttagtctagtattacaactcatacaatgggaaggaggtctagaaatagatataccttctggaatcctaaaaatacagacgttaaagaaacttccaaacactatacccactataaatacatatagattaacgattataatatccattgtagtttactccacctatcattcttgtcataaactcttggtcagtacacctactaagtgccatatcttttgtaatctttccatttttataaagttccattaaatcttggtccatagttttcatacctactttaactccagtttgtatcatgtttggaatttgatatgttttgccttcccttatcaagttttttattgctggagtagcaaacatcaattcaattgctgctattctgcctttcccatctgctgtaggaagtaactgctgtgataccacaccttcacaaactgtagataactgtgtttttatttgttgctgttgggatggttgaaacatgtctactattctatcaattgtcttagctgcccctactgtatgtagtgttgaaaatactaaatgacctgtttctgctgctgttaatgctattgaaacagtttcagggtctctcatctctcctattagtattacatctgggtcctgacgcaaaatagctctaagggctgaatgaaaactttctgtatcagttcctacttctctttgatttactaaactttgtttatgatgatgtacatattctatcgggtcttcaagtgtaattatatgtttttgttgtttttcatttattatatttatcatacttgcaagtgttgtacttttaccacttcctgttggacctgtaactaaaactaatcctttatgcttttcagtaaaagattttatactctctggaaggcctaatttttcaaatgttggaatttctgctgttatagtccttattgctattgcgtaatttcctttttgcctatatgcatttaccctaaatctttctcctgtttttagagaagctgaaaaatcagcttctccatgttcttctattactttaaaaatagattcccccgctatgtcttttgccatttgcattgttacttctgatgtcaatatttgttcacttagttttacaaatccaccttttactctagctacaggatttgttccaactgttatgtgtatatctgatgcgtttagtcttataccttgctctaataaatcataaatatacataatatttactctccatatcttctattagtttacttatttttttagtagtaaataataaaattattttattatttatttatactaagttgcttcttatatttagtttacttttttgtatgaacttatatcatgattaatcaaaattttatcttttatatcataatttccaactacatttgtatctatatttagattaaagtttacaatggcgtcaaccttatactttgaatttgaattttcttcaacacctaaaccaataatattttttttaccatctgtaacttctacttcttttattccatctttatcaccagttaccattaagcttaactccgcccctgaaccattttcttttaatttaggccatccttcttttgtcatgtcgtagtcagccttataaaaaggtatttttatagtaataccttctgttttatcaatttcttgtggttttaattcttttaatctgcattttatctctgctaaaagctcattttgtatatagtcaaaagttgttatcaaagccatattatcatatttaacaggtattttctcataagacatactttttagttgattacattggtctgatatttcatacaataactctttatactttaaaaaattttttgctgtattttttttaccactagatatattatcgcttaacttctcaaattttcttacattatttctcaaatgaactcttaaagaattaaatccttgagtttgatttggtaaaatttccaataggttttctaatgtatcccatttactattccagatatactccatactatttattataggattttgtattagttcataatattgttgagaatctggaatcccattagatacttctacttttggctcatctatatgaaacgtatgtctatactcaatcatattttgcatcgccaaagaaatgttatctaatgccttataagtatgtgaaaaggctgaatttaaatgttcattttcaattttattttcttctaaaaacattttcaaaagaatatcattattcactaactttgcctcaatcaatgtagttgagtctatatcttctttcagaatatattcatttattttactaatatctccagaagtataattcttgcaaatttctaagatagaatctctatgtgaaataatatttgcatctacatattcaatgtctctatagtccaacatatctaaatcatatagctttttcaattccatactagctttttccaagtctgaagaagctttatttaaatagaaatttatattattcatatatccaagtctttctgcttcaatatttttctcatcttgattattaaaatcttcatctgatatatttcttaattttgacctagatatggatttttcttgattttcacttttaaactcattatccattttctcaagctcatcatacaatttttcatatgctttatcaatactattttccacacatgtctctgctaaatactttgcttgtataccttcattagtagtctttgtagattttattctattagctatctgatttgaaaatatcaatccaacaatagaaagcaatgctactacaatcaaaactaaaactaaagctgcccctctttcacttttaaatttattccacttcctcaaaatctcacccccaagtaaaattatttatctttaaatatttcagttacaattttaacctcttttttacttgaatagtcattcatgcttttcccagttacagctattttatatatctgaccacttttatcttctacaatagtctttatcttatttgtaatatttcctttgtcgattaaattaccatcttcatcttttattgttgtaatcttttcatatggagtatcatataagctcacgtcaccttcactaagaactttatcatatacaactttttttgatttatctattaatttttcatatacgacagttccatcttctagtttatctaaactatcaaaatcaaattctccactttttatcttttctcttagattttctatttcactttggacatagtttaaggaagttatatctgtgtcatttttagtgtttgctttgttattagtattgataatattaaaaaatgcaaatagtacaattcccataatagccatagctactaacacttcaattaaggaaaatcctctttcactattctttttactcatattttatcaacctacttattttttaataaattcttattaccctattcttgacataacatcaaatgtataagttttgttatttaaattgctatttttatgactttcttgcactgattcattatagtatatacttacagtataaatagatttaccagtttgcttttctattttaaatggtgtttccttcatttctttattgttttgaactagtggttgattatagattatctcttctctaacttcattttctgtatcaattgtattgttttggattctcgttacagaatatacctctgtattttttttagtttctatagaaacttcatattttacaacattatctggcatctctatattgtattcataattattacctgaaccagttttagttagctctttacagttttccaaatctctatttagatacttattaattagattaatatttacttgagcatctgtaataatctgttgcttttttactgctgatgttataccattgaacactttataagaaatacttaaaactattgtcagtataaaaacagctattattacttctaataaagtaagacctttttcattatttttgtacaaactcatcacctatctttaaagcttacttagctttatttagcactagacttaaatggattatattttcctggtctccatgaagatggattatctgtatcaagtatcattgtagtattctctttagtgtacattataaatttaaatgtagcatctactacaccttctgcctttggagctacgacttctttttttgcttctttttctgttgcagctctaagtacacaagtattacatagataattagtagacctatctaaaagtttgtcattttttagaatctctccttcttttatcaatggacaatccttatataaatgccacttattttcgccttccacccagtatatttttgtatctttatttatgttcacatttttaattaaatccttattgtttgttgtttcttcctcttctttttctggttctatatatgaagtcattgtataatctagtatttgagtaacatttttttgttcttctaaataagccattaattttttgacatttctataatcacctctaacacttattgttgttgatataccataaaaatgttcgtattctttaacatttccaacgtcataactagttaagtcaatattataagccttcatttttttatctaaacctattaaaaaaagaccatcttgcatatcatataaaagatttttgcttttttcttttaattcactttcaacttcttcaagttgtttttcatattttggcataagtgcagttttctctttatatatatttaatttttcagtagcctgttttacagaattttttgtagcaatatatttctgatattgagggtaaagtccaaaataaccatatgataaaatagctaataaaattataacctttataagaatcccttttagactaacttccattttaaatatatcttttatatcttttttaaatatatctttattcattagttaatacaccttctttcaggtataatgtcatactaaatgtatagttagaatcttctgcattactttttatgctatgtaatttaacatccttgaaatagtataatccctttaatttatataaaaattgacctacataagaggaatctttagcatttccttctatatttataacatttggtatcttatcatacaatggagttttatcatctttatccgtgttattactattagtctcactatttccagttaatgcttctgacacatttgtagtcttatcttcatttaaatcattatctgttttatctccattactatcacttttcgtacttgattttgtttcattgttacttgatttatctgttgtagtcttattactttttgaattatcagctttattattagttccaagattttgataagttgttgataaacttgttagttcaactttacttggagtatttttatctatatcatccaataaattttcccactttacctttttcccaattaacatatcatatacctttatttcttcgcttttactctgtatcattttttctatatttccaatctgataatatgcagattcaatatttcttatttcaccattaacattttcaagttccttatttgctaaattatttgaaaaaattaaacataaataaggtatagcaagaatcaaaataactattggagcaattttcagtatgtttttcatttgtttagcttttatctgttttctaagtatatccattggtaaaaagtttatattttcaaaatctcttttccctttaggttctatcatacttcctaaaagctctacaattgaatttatatcatcttcatctatatctccagttatcatatcagatatatccattatctcagtaaggccttgagaaacatagcttgaaaatgcagagctaaaagtttcataaattaatttattggaatatctttttcctaatattaatatagtatccgtaaccttaccaaagtttcttgacgaatagtaattcataagaccttttgattcttctactacatttaataattgcatgtccatatctttagcagttatctttataggtatattatcactaataaataaagtatctttcttatatatatttataattgtactattgtcacttatattggttaccattatatcattgtagtctaaatttttaagcattcttaagtaagctgttgataatgtatctattctatctaatactaaatcaaattcatgcattatctctacaattgcatttacctcttccttttgtatagctccaatgataagatttaagcttgattcatcgccatctgaattatcatgtgtttcactagatacttcatacgaaaatacatattcatctgactccaaagccatcatttcgtccatctctagcttcataaatccatctaaatcctttttgtccatattaggaagtttttggggttttaaaattacatctcttgtatttaaacaaaaaactacatgtcttgattttaacttaacattttctaatgcgtatctcaatagagcatacttttccttagaaaaatcttgtgcaatatcctctattgaaaacacattaaaattttttacataaaacttatccttatcgtgtttatatctgccctcaactatggaaatagaatcgccataatatgatacataaaccttattcatttgtcctttccctcctacatggcatcatatatactaagcattggcataaatattgatacaaccagtatcgcaactataataccaactgcaattattaaaacaggctctatcattgaggccatcctatttaaataaatctcggattcatactcataaaattctgccatctgtctacttatattctctaattcccctgtctgctcccctatagctatcatctgtaccaacacagagtcaaaatacgtatatctctctaaattttctgctaagccttctcctcttgttattccatctttagctgatgctaaaatcttctctgccatggtgttatttacactatctataatataatcaagcccttgaactaatgggtatcctgttgatacaaatagatacaatgctcttgaaaatcgtgtagctaccatacaatttattccttttcctaaaacaggtatcttgtttataactctatctttatgagcccttccaactgacgtttttaaatattttttaaactgatagataaataatataataactaaaagtactattatccaaaacttcttcataaacataccaaaccccataacaattcttgttataagtggaagagttgctcctactgttgtaattgaattaatcatcttaggcaccataaatgttgtaaatataaaaatcattataaatgaagaaatcaaaactattaatggatatgttgcagcatttctaagcttttgtttaaccctgtgttcacttgcataaaatgaagccatactttttaatacttcatctaatttacctgtagcttcacctgtagctaccatagcaccaagtaactttggaaactttgattttgatgaaagcattgaatctgcaatagtagaacctacttttatttctgccactatacgattaatttcttctcttaatgtaatgttagttgaccttctagctaatgtttctaatcctgaaatactatttataccagaagatactataatagcaaactgtctacaaaagtggcttatctggtcagctcccaagtctttttttctctttctactagataatcttatatttttatttttgctttctttgatttcaataactctaagatttctctttctaagaagatttctagcttcattaaaatcgttggcttcaatcacatcagtttgcttttttccgtcctcttttattactgtgtatttaaaacttttcataatatcatcctttaatcagtcatcaaaattattctaatcatttcttctactgttgtctttccatttaaaacctttttaactatatcctcttttaagctaaccatgccttgttttctagccatctttaaaatttctctttgatttgcagatgaatctattaactcttttatttctggagtaatttcaagcatttcaaatatacctagacgtcctttatatccagtattattacacctttcacaaccttttcctctataaatagttactgattcatttacatcaataccaagagcctttttttctccaatatctgcttcatatgaaaccttacaatgctcacatatttttcgtgtaagtctttgagatattacacctaaaacagatgaagttattaaaaaactttccacatccatatctaaaagacgtgaaattgctccaactgctgtatttgcatgtaatgtacttaaaactaaatgtcctgtaagagaagctctaattgctatttctgctgtctcagtatctcttatctctccaaccattattatatctgggtcttgacgcataaaagctctaagtccgctggcgaaagtaagccctgccttttcatttatttgagattgatttacaccaggtaattcatactctatagggtcttctattgttaatagatttctattttctgtatttagttgatttaacattgaatacaatgtagtggttttcccacttccagtaggaccaacaaccaatataagaccataaggagtgtttatcaattcatcatatatcttagagccatgttcgtctattcctagtacttctttactaaccataaaattactcttatcaagaaccctcatagctatcttttcatccctgttagttggcattgtagaaaccctaaaatctatgggtttattatctacttttaaatagattctaccatcctgtggtattctcttttcagatatatttatatctgacattatcttgatacggctgattactgccttatatggtgctgagttcatcctcatatattctcttaacattccatctatcctaaacctaacacgcatgtaattttcactttgttctatatgtatatcacttgcttccattctaacagcattttctagtatgttatttactaatcgtactattggagcagcatttacatcttcttcaagtattactgtttctcttactccaccagttctatttttgttgtactcagtcattgccttatttatttctgaatgtgcataagcatgacctattgctttgtttatatcttctgtacttgatataaatatctctacgtctttaccagacatacgccttacatcttgaactgcttctctgtcttgtgggtctgacatggctagacatattttatttccatcaattttaaatggaaatacagtatatcttttgcatatattttctggaaccatctttgtagctaaagtgtctatttctgtcccttctaaaaatatactttctatatccaagagttcttttaatacacttattagtaagttactatctataagcccttcttgtactagaaattctcctagtctttttccactgtttttttgttctgatagtgcccatttaagctggtcttctgttatatatcctttttcgaccagtttgtctcctattctaacttttttagccacaggtttcactcctttactatctcaattatatcatcattcataattgaacattaaagaaaatagtataaaaaaacaggaagattttcttcctgtcttttatattatatttttcattaaatttacaatatttttataaaaatatagttttaactattttgttgagtccatcacagtattatctataagtactatatatagaactttattatctacttttgtattacttgttaatggatttcccaaattatctgctgtaacacttgtatatattttattttcacctatatcactcaataattttgctgattgtgcttctgttaatgtaactccttcatcatttgtacctatctgtaataccaatttattaccaactttaatcaatttatattttccacctatatcagctttatcaggcagagactccatataagtctctaaaacacttaaaccagtttgaccatctggtgtaactggtatcttattagtatctgaataataagataatgctgcactcttaactgaactataatcagactcaacacttgctaccttagccttgtttatattactaaataaagctggaactgccactactgctaatatacctataattgcaattactaccaataattccactaaagtgaaaccttttttattcttttttaacttcatttttattcccccttaaattttttaattaatacttacttataatatatctggttaaaaatctaagtaaaattatttaaacgtactaaccaaatttatttctaacacataaccattttttaaataaaaaaagctatgaaaatgatagtatctataaataaatacaatttcatagccggttgcaccactaactcaatatgctctaaggtgcccacattacagaacataaatcaacgtttctattttattaaattcaaaattatataactcataatgtatatacatatccacttatattatataatatctaccatattttagcaacactgtttatactatttatatataccaactttttacatattgaaacagaatttctagaaaaattatactctacaaaaaaaagaaacatctccctacaattattatatatcgtaaggagatatttataaattatcatttagttttatcattgtcatttccatcctttgctaatatttatttgaaagctaaaagctattacaatatagtattttataaaatcatctattataaacattctatctattatagttatgattcagccacaatcattatataaacgaaactcttcatttacagctatgcttattgtgcaaaattactctttacagtaatcttatataatccagaaccctctcacaaacactaaagatagaatagatactattttcaattcttataaataaactttcaatagatttttatattcactttagattgtgactgaatcatttaattattaggggttcatcttctaaccttcccattggaaacacctctttctttatttatatttacataatactacataatctgaattttttcaatacttttttgtaatattttttatattcataatattttgaataatatgccctttattaagtttattttacttaaatatacataattttaaactataatctctttttacaataatatatacctttctaacaagaaaaaaataacattccataagtataaaatcaaaaaagagttgctcaaaaggtttatatccttttaaacaactctcataaatacaataaattagaataatttacttactgattcattagagaatatcattcttatagcatctccaaataaaggagctactgtttttatctttatcttatctattcttttctcttcaggaagttgtatagtatcaagaactattaactcacttatttctgaattagcaattctttcaatagctggacctgataacacaccatgagtacaacaagcataaacatcttttgctccaaactctttaagtgcatttgcagcattaactattgttcctgctgtatctatcatatcgtctaatagtataacatttttacctttaacatcacctattaagttcataacttcgcatacattagctttcggtcttcttttatctattatagctattggaacttctccatttaaagtattagcaaattttcttgatctagtaacacttcctaagtcaggagatactactaccaaatcttctattttcttttcattaaaataatttgctaatattgttccacctagtaagtggtctaatggtatatcaaaatatccttgtatttgagctgcatgtaaatccattgttaatactctgtctgctccagcagcagttattaaatttgcaactaatttagcagtgattggatctcttgccttagcctttctgtcttgtcttgcatatccatagtaaggaatgactgctgttattctacctgctgatgctctctttaacgcatcaattaagattaataactccattaagttatcatttactgggctgttagtagattgcactacaaacacatcacaacctcttactgtctcattcatgtttacacatatttcaccatcactaaatgtacctacttcacaatctagtactgatacacctatatagtcagctattttttgtgctaactctttcgatgaattacctgcaataattttaatctcgcttccgctagtattcatttatgtaaccctcctgaaaattttaaaatactaatgaatataatttataataatttcgagctaaattttttagccaaaataataaactacataattacttactttggtcgtctttttgattctttttttctacccatccttctttgataacttgtctttctcttgctattgccaaagcaccatctgggacatcatgtgttattgttgaacctgttgctatatatcctttttcttctacaactactggtgcaactaaattagaatttgaacctataaacgcattgtcttttactactgatttaaatttatttttaccatcatagtttacaaatactactccacatccaatatttacatttttaccgacatgtgcatctcctatataagaaaggtgagatgcttttgatccatcttctataatagcattttttacttctacaaaatcgcctatttttacattatttcctaagtcactctttggtcttaagtatgcatatggcccaacattagaattttctccaaccttactatcaattatagttgaattttttatttctgtaccatcacctatttctgaatttgttatagatgagttcattccaattatacaatctgaacctatccttgttttcccttgtaacataacacctggatatattatagtatcattgcctatcataacatcagattctatataggtagagttagtgtctattatagttactccatttaccatatgagattcatttattcttcgtctcataatttcttctgcctttgataattctactcttgaattaacgcccataagttcttcaatagttgaacctgcaaatgcaccaacttttaatcctttatctctcattattttagcagtatcagttaaataatattcaccttgtgaattgttattatttagcaaatctagtgcttctctaagactctttccattaaaacaataaattccagagtttatctcacttatcatcttttcttctgaatttgcatctttttgttccactattttaagaaggtcacccttcttatctcttattattctaccataacctgttggatttccaactcttgttgtaagaactgtagcatgatatttattttctatatgatattcaaataatctcttcagtgtctcttcttttataagtggagtatctccacaaagtacaactattgtatcttcatcattaatatattctttagccatctttacagcatgtcctgtcccaagttgttctgtttgcatggctattataatttcttctgcaagcttttctttaactacctcagcttcatgtcctaaaatcacgacagtatcttttacccctgatttttttgaaacatctataatatggttaaccatttcttttccacatactttatgtataacttttgggtatttagacttcattcttgttcctttgccagcagcaaggattatagctttaaagttcattgatacactccattcaatctaatttaattttattcgtattattctcttaatcaatatacattataatacatttatctaacaatttgtatacaacatatacattatcactaataatatagcacttttttactaaaaagtacatattttaatagaaattctacatttaaaaagagcctaaatgttcgggctctctccattttatatatttattattcagcagctacttcccattgaactaatgcttcatgatatgcttgtaaaactgcatcttctaaaacttgtctcatttctgcatttattggatgagctatatctctgaaatttccttcgcctacttttctgctaggcattgctataaatagcccattatggccttctataacttttatatcatgcactacaaacaaattatcgaaagttattgaaactatacatttcatcttaccttcttctgttaattttcttactcttacgtcagttatcttcataccaaaatatccccctttgattttgacagaaattaatttatattaaaattattatcgctggaataaattaatataaactgttttttaaataattctatgaacaactagggatatcctctttttatttttacatatttttctaaatattttttttattaatcttcatctatctcaaattcaaattctgaatcttcttcttcgtctaaatcttcatttctatattcatctttaaaagtctttaagtttggttctactactattttatctccattaacatccaattgaatcaatgaaatataatcttttaccattttttctgaaggattcgttgtagatatgaatactccagtacctataacctctgcaccaaattcattcataaggtctaccattccttttatagtacctccacccctcatgaaatcatctataattataactttactatctggtttaagagcttttcttggcaaactcatactttcaactttagagctgtttccactcacatatgtcatgctaagtgtaggaccttctgatacctttatatcttttcttattataactagaggtaaattcatagcttttgcagtcataagtgccataggtataccttttgtttccattgtcacaacataatctgcatctacatactcaatatttgatgcgaatatctttcctatcttagcagctattgtagggtcataaattaggtcaatcaagtataaaaaaccaccagatagtattctagacttgtcacatattctctcacataattccattaagaactctgcattttctgctatagaagttttaggtatatattttactcctcctgctgctcctgagatagttataactttacctaaatgtagcttctcaaatacattttttacaactaataaatcttcacttattgttgattttgctgcattaaattgatttgtaaaataacttaatgtatatattttatttggattatcagacagtattttaactattgctccaattctctctgttcttttaaatttcattattatttcctcctacaagtacctttatataacgttaaactaactaatgcataacaattcttattgtggtataatattacttatgttttattatattcaaaaataaaatacatataatattatatgcatattaattataaaatattgaacattatattattataccacataaatagttcatattgtaggacttaattaaaaagaaaggtggttttattatgaatatacactttataggaattggcggtatcagcatgagtgcattagctgaaatatgtatcaataaaggttatcaagtttcaggttcggattcaaacgaatcatacctattagacaaacttagggaccaaggggcaactatttatattggtcagaaaaaagataatatatcagatgatgtaaatatggttgtttatacagcagcagttcatccagacaatgaagaacttgtggctgctaaagaaaaaaataaattggtaatgaacagagcgacttttttaggccaaatcatgagggaatataaaaattctatagcagtttctggaacacatggaaaaacttctacaacatctatgttatctacaatctttgaatatgcagacttagacccaactatactagttggtggtaacttaagtatgataggtggtaatgttaagataggtaattccaaccactttataactgaagcatgtgaatatgtagatagtttccttaattttaacccaaagatatctatagttttaaatgttgaagaagaccatcttgattatttctctggaatagatgaaatcaaggcttcttttaacaaatttggaaaattattacccccagaaggctatttcataataaatggcgatgatgaaaatattgatgacatattgtatgatgttaaagctactattataaaatacggtagagattctgacaatgatgctgtaataaaagatattcactttgacaatagtggtcatggaatatttagaatagaatatgaaggaagagatttaggagaatttgaactttctgtatatggtcttcataacatatacaatgcttcttctgctataatggcagctcttgtttctggtattgacttagagactataagaaaaaatataaaaatttataaaggtgtcggaagaagatttgaaactaaagggtattataagaatgctttagtagtagatgattatgcacatcatccaactgagttaaaagcaactttagctgctgccaaaaaattaaaaaaatcaactttatggtgtatcttccagccacatacttatactagaacaaaatctcttttaggtgaattttcagaggcattctatgctgctgataaagttatcataacagatatatatgctgctagggaaaaagaccctggagatatacattctaaggacttggttgagaaattatatcaaaacaatgtagatgccatctatataaaagaatttgaagatatagtaaaatacttacgtgaaaatgttaaggataatgatttagtaataactgctggtgctggtccaatttataaggttgcagacttgttggttgaaaaataatatataaaaataatttaggctatcaaatatctaatttgatagccttcttaaagtcttatttctttccaatttcaaatatctcatttttaaggtaatcaaataaacttgtatgaacctcatagtaagatacatttttcttagaagtaacttttacataatcttttcccattgtatcaacttttacatcaaaattatcaccttttatatttatagtaaaattatagtcacttctttccttacttttctcaggttgaacttttcctacaaccctctttgaaatcatcttatgtgctaaatcatcaaatttccatctatgaacttttttaatttcttttccatgagttatagtaacctctttccaatctttataatgacttaaaaggtcaaatgaagtatatatactctcatctaaaagtttcttaaaagcatccttagaactaactggtactttataatattcttctttatttacagtatatactctaaaaaagttaaggtcagtagaaaatttaactccatcatcagaataaccttcataaactgcttcgtaagaagaagtagtatttcttactttcttaaaatctgagaaaaataactttatttcatcccacatatcttcttcaatttttatgttttctatatttttgtctgatatataaacctttttcttttcttttatttgagtccttaaagacctattatcttcttcttctttttctaccttctttggcacttcacttttatccttttccatatttattcctattctaaaggatataaagtatattataaagaaaacaactactcctattaatattgcagcttttttctttagttttcttttcttgctcatttaaccacccctagagtttataatcataaaacaattatataactttttacacttttttttaagttttaattaattattacacttatttccttggcaattagtacatggttcaacgtgaactgttatgccttttacaaattccatatgttttattatatgtttttcaagcttggtagcaatatcatgaccttgcttaactgtcaaattttcatccacacatatagtcaaatctacatatgccatagctccatgttttctagtctttatatcaccaagatttttaacaccttctgtatctgctacaataaattttaattcttttatctcttcttcgtcaactgaaacatccatcaattcattaacagaacttataagtatactaattcctactttagctacaaatatagccactacaattgacgcaattgggtctagtggcttaaaccctaaaatagaaccacctatacctataaaagcagctactgaagataaagcatctgacctatgatgccaagcatcagcttttaaggctggtgaatttatctttttagcaacttttattgttattctatattgatactcttttatcaggattgaaataactgatactactaatggtaatattgatggaacacttaatgcatctaagttaaataaagatttaattgcctctatacctattgttatagaaacgaaaataagcaatattgataacacaaatgatactaatgtctctgctttctcatgaccataattgtgctctctatctccaggtctagaagatacataattgcctattagtactcctatagaacttataatatctgatgctgaatgtaatccatctgcaatcatagcgctagaattaccaataacaccagctataaccttaattattgttaatactacattccaaagtattgattgtattgttattttatttgcttcttcataccttgtttccatatttattcctcccttatgaaacaatctaaatattattaagaacctacatctgaacataaattaaacactctcttatatgcaaatgtatactctttgctttcaatagagattatcaatcttctataaaatgaaaaatcacctagcttaagctaggcgatatatatattatacactattatttaaatttatgcttcctttattatctccactaccattttagcagagtcatataagtcttttatagctatatgttcacttagtgtatgagcatttttcataccaattcctaaagttatagcttcgataccattcttacttaatatatttgtatcgctacctcctcctgtagattcagtatgaccttctatacctaagtttgaaaaagccttctttgcaagttttattatttcagaatcctcactaacatctattggtgtatatgctctattgacatctatctcaatttgagctccaaaatcttttgcagctttttcaaaagtctctaccatgtgtttagtttgaacatctaatttattttcttttagacttctggcttctgcaactatattaacttctcctgttactatatttgtagctgttccaccgtttataattcctatgttagcagttgtttcttcgtctattctaagtaaattcatattttctattgctctggcagctaccattatagcacttattccagcttcaggttcaagacctgcatgagcagtctttcctaatatcttaacatttattacatcttgtgcaggagcttttactattatttcacctggagaaccaccactatctaatataaatgcatattcagaatctatttttccatagtctaaatttttagctccaactaatccacattcctcacatatagagaatacaacttgtatatcagtatgttctatgttattttcatttatatatcttaagccttctaatatagctgctatacctgctttatcatcagaacctaatattgtagtaccatcactttttattattccatttgcttcatccactataggttttacccctatacctggagttactgtatccatatgtgaactaaataatattttctttccttctttatttccttttaatgtagctattatattaccagtttctccatttgctttttcaccagcattgtctattactactgaacaacctatttcttctaattttttaactaatactttagcaacattcccctcttttaaagataaactatctatctgtactaattcaagaaactcatttaaaattctttgctcgtttatcataattttcctccataatataataggtatttcaagatatattgtagtgtaatatttaaatattatcaatagtttttaaagttttgtactacatttcattaattttttcagtaaaataagaattgagtctaaattttttcatttttattatttttacctaactatatttctttgtctagaatctataaaacatagccaatatcctaaactatttgttctattatcacaagcttgatatcttaaaaatcctgtgcttccattgtctggctgttcatttctatttcctgggatagcataaatataatgttttctcttattatattcatcatactgaacaccaaataaatagtgtctgtatttatatgaatgtaaaactgcatcactatacatagtgtaattcaatacgtttaaatatcctaaataaggcattgtatatccacacagtgttgtaggatttatctctattttccaccatcttgtcttatctatataatctgttacaaaaggttttacttctttaaataatttcaaacctttttttatttgtcttggcataagtaatgtactggtttgtttatttccactctctccttgacttactccattagctctttttattttttcaatattattctgatctttttgaactttctttgatttagtaggttttgaggaaacaaacctatcttcttctctatttacttcaaaaacttcttcttcttcctcttcttcctcatcatattctatgtctatatattcttcctgtactttaaccctattataattttctatttccttataattattgaactcttctatttcctcatcaccagaatcttctacttccgttcttgcttttaactctccttcttcaatatcttcatcatcttcccaatagtcttcatactcatcttcatcatattcttctataatatattcttcttcactatcttcgtctctatcactttcctcattatcctctatctcttcgtcttcttccaactcttcatattcttcatattcttcatattcttcttcctctacctcttgaaataatatgtcctcataattttcaagcttatttcccttaaatccaattaaaggtatatttctttcatacaataatgcaataccttttatctcatcatcagaatcttctaaatctaaaacaaattcacctcttccttgttcatttaaaattatatttcctaagtctattaatccatggtcatcttttattgctactgctttatacccatctttaacatattttagattttctacatataatgcaataattgctttttcatcatttacttcaacttttgcaaaagcttttggcagtactcgttctttgtatctaaagtttatgtctttagcttctagtattatatagtctcttttaaactttcttttagaacccactgcaatccccccttaacacagtttctctaaacaatatatgttaacaaaattaaaaaaagtaccttctatttagaagatacttttgtatttattatatttgaaagaactgaaaactcttctatactaagagtttcaccccttcttttttcgtctatattagcttcttttaatatttctcttatttcatctttattaagaaaaccaagacctcccaacgaattaagaagagtttttcttctttgtccaaaggatgcttttactgttttaaaaaatatgtcttcattatgaacatcatattttcttttatctcttacatgtaaacctataactgtggaatctacatttggttgtggtataaacatatgtcttggagcttttgccacaatctctgtatcacaatagtattgaacagctatagataatgccccataatctttagtacccggaatagcattcattctatctgcaacttctttttgaaccatgactactatgtctgttacaggtatgtcttcctctaaaaatttcataactattggagtagttatataatatggaagatttgctacaagcttaactggtccaccatttaatttatcttttactaattcctgtatgtctacttttagtatatcttgatttacaacctctgtattatctaaatctgacaaggtatctttcaatataggaattaaatttctatcgatttctatagccactactttttctgctattttacccatctcacgagtaagagttcctataccaggtcctacttctatgatattatctcctcttgtgattctagctccagataagattttatcaattatattactatctatcaagaaattttgacctaaagactttgaaaatttaaaattatatttttgtactacttcctttgttgcattatgtgaagatagtctatccattatttactcctttttaacttattttgatatttaattttattaattatacttatttatatgtatttacattgatttaaaataaggtatatattataaataatttatcttaaattaaccgtaattccacaatttattttatatacatatttttcatacattaaacattacgtttagatttgttttaatgcatctataaattcttctctttcaactccataattattcaatctatttaaaaattgttttgcatttccatatccaattccaagtatttttccaagtgcatctcttctaagtgatgcttcttcattacctataagaccatttctaattaagtcaacttgcttaaattcatctcttttttctgtattttcagttctaactttattcagagctgctattatactttgaggagtagcattctcaatacctatatctccatcctttttagcttcctctcttggtagaaatgcatgtttacatcctggaacttctgatgctattttttttcttattttttcacctgcaaaatctgggtctgtaaatattataacaccacgtctttcattagcagcttttatacgctgcattacaccttttggaaatccaaatccacctgtagttataagttctgcatctattgctctcttaactgctgtaacgtcatctctaccctctactactattatttcttttatcatataaattcaccttttattcgtttttagtttttctttacatctctttattttaaggtttttatttaatttaatcaaggtactaaactatttatttttatatagaaatatgcattttaaataaatatatcaaaagagcctagatgtaaaacttatattctaggcgctttttgtactaaattttattgtaaggcttagctctctttttctgtctttccatcatatttttctatccatttatttagtatagcctctctatttcttgctgctgattttaaatcattatctatcatctgttctaatggattctttggaaatccttctggcaccggatttcccgtgtcaattgtagtaactgcaaaattcttagaatactcattcattgcatctttacttatagcccaatctaaaaatacttttgatgcttcttttatattatcttttttcacaagtgcatttgattctatctcccatccagaaccttcttttggaaatactacttctactggataaccttcaccttttaactttatacctctatttccaaaagatataccaatgggatattctcctgaagctgctaatatagctggcgctgaaccagactgagtgtatacaccaatatttttatgcaatttatccatatactgccatgctttttcttcacccataatttgtatgagttctgatactgttaaatatcctgttcctgaagaagctggactaggcatagatataagatctttatattctggctttattaaatcttcataagaattaggagctgatatgtttttagcttttaattctttagtatttactgttataccagtcatccaagcatctattccaacccaagaaggaactttcttatcatctttaaatgcaggatttaccttatcaaagcctttcggagcgtatggctctagcatttctttgtcatctaaaattatcaaacttgtagctgcaacaccccataacacatctgctttaggattatctttttctgctaataatcttgctgttatacctcctactgataatctaagtacattcaatttaatatctggatatttctctttaaatgtagctaagtatgtatctatactatcttcctcaattgctgtataaactgttaactctccttttgtcttattattagactttaagtttgaacctgatgaaacattactacatccagttattacactcaataaaagtgttgataatattcccaaagagactaacttcttaaatttcatttttacctcccttattcaacttctttttgttgccatttttatgtcttggtttttaatttttttattatcaattcatacaaaagttttactattatatttgttaaaagcactaatacttccataacagctgatggtcctatatacaacactatatcatctagctttagtttttatatcgatacggtctgagtttgaggtctataatttctttgaaatctctattaaattctacccttatatcttctggtctaattgctatcatgtttatatcatcatccataaaatctattgctcctataaaatcagctactcctagagctaacctgaacttaaataattcttctctagttaaatattcttacttccaattttaagttatccagaaacaatttaccttttatttttctctttttttataatatataacaaactgctcaaattaaaatatatatatatatctttttaataatcgctcaatattttatttactttagtttataattatttaatatcttatttactttatatataacatctatactttaataatgaaattaaaatatactattttaaactgtagtatatctatttctaaattaatctctaaaaataaaaaatataccattcaaactgaatggtatacttactctatacatttttatagaatattcacttttcttgacctatattattctcaacttatattattataataaaatctacttaaaaaaattttttctttttactccatttgtatagttttacttaactctctttttctgtcttaccatcatattttgatatccatttatttagtatatcttctctattttttgctgctgattttaaatcattatctatcatttgctctaatggctttttagggaatccttctggtattggatttcctgtagaaatagtagtaactgcatagttcttagagtattcattcattgcatctttacttatagcccaatctaaaaatacttttgatgcttcttttatattatcttttttcacaagagcatttgcttctatatcccatccagaaccttcttttggaaatactacttctactggatagccttcctcttttaattttatacctctatatccaaaagatataccaataggatattctcctgaagctgctgatgtagctggagctgaaccagattgagtgtatacaccaatattctcatgcaacttatccatatactgccatgctttttcttcccccataatttgtataagggctgatactgttaagtaccctgtaccagaagaagatggattaggcatagatataagacctttatattctggctttattaaatcttcgtaagaactaggaactgggatgttcttatcacttaattctttagtgtttactgttatacctgtcatccaagcatctatcccaacccaagaaggaacttctttatcatctttaaatgcagactctatttcttcagaaccttttggagcatatggttctaacatcccctggtcatctgcaaccaataagcttgtggctgcaactccccatacaacatctgcttgaggattatccttttctgctaataatcttgctgttatatctcctgttgatgccctaacaatatttaatttaatatctggatatttctctttaaatgtagctaaatatggctctatactatcttcttcaattgctgtgtaaactgttaaatccccttttgtcttactatcagactttgaatctgaacctgatgaatcagtactacatcctgttattacacttaataaaagtgttgataatactcctaaagaaactagctttttaaatttcattttttcctcccctatgcaacatctttttgctgccatttttgtgtgttattttttaatttctttgttacaaattcgtacaaaagtcttactattatatttgttaatagcactaatactgccatagcagctgatggtcctatatatcctatctcatctaactttagtattgatattgatgcagtctgagtttgaggtatatataaaaatattaatgctgaaacagtaaccattgaatttacaaaataatatactactatttcaagtattgatgttatagacatcggaactgttatattaaaaaatactttatagaatggaatatttatagattttgcaactaattcatactctttatccaacatttttaaagatgaatttgaggttataaaacaaactgaataaaaatgaactacatttactataactaatattgctgtacttccatataaaaaatttaatggattacttgctgagttaaaaaaagttatatatgatatacctaaaactaagccaggtaaggccattggtatcattgataaaaggtaagctgtttgtcttaatttaggaaacttatccaccttttctattatataagcactaaaaaatacaaatatagttccaaatattgctgttaaagttgatattttcaaactgcttaagtatgtttttattccacttcccaaaatacctttaaatgtatagtgttccattgtaaagcttaaattatatggccataactttataactgaacctataactgaaacgaatattaaaataaaaattagcaatgttataaaactacatactattaaaaatactctatctctaaacttattttccttaatcttatatggcatagactttgcagttatggtcataccttgtttcttacttgccatcttatctaatgtaaatgctattagtacaggaattaacattaccatagaaacagtagctcccattggtatgttaaattgtccaactacttgtttatatatgtcagtagccagtacattgtagtttcctccgactaccttagctgctccaaaatctgtaaatgcaagtataaaggatacaaagaatgaactaagtaatgagtactttataccaggaattgttattttgcaaaatttcttaaattcactagcacccaagctatctgctgcttcataaagtctataatcagccatcgaaagtgctacagataatattaaaaaagcttgtggaaatgtaaatagaatctgagaaataattattcctaatggaccatatagtggtacttccagacccatggttgtaaagattcccttatttccaaaaaggtatataagtgaaataccatataacatagttggtgcaaaaagtggaaacattcccatagttttaaaaaaatctttaaactttatatttgttcttgttattgcgtatgaatatataaatgctaaacatagtgatattaaagatgagactgtagatacaaaaattgaatttttaaatgatgctataagacttggattttcaacatatttactaaagtttgaaattcctataaaatttccacttgtatccataaatgcattttttaataatgatactaatggaaataatataaatactattagtacaattaccgaaaaaatcaagaaatatttttgtattgtgctatcacttattcttcttttattttttgatgttatcatttattcacccctagctattaagcacatccctctgatttatattgtacaattccttctttaggtatcttaaagtttattttagaacctatgcacagtttcatttgttctgcaactttggaaactacatctaatttcatttgcttagaacgatactcaactgtaattctatagttaaatcctctaaattcgatatctaaaatttctcccacttttatatccttatctttagaatctctattagactctacttttatatcttctggtctaatagctatcttattaataccatcatctataaaatttattgttcctataaaatcagctacaaaaggtgtttctggatttttatatacctcctttggcgttccaacttgtattatttctcctctattcataacaaccatcttatcagctaaacaaagagcttcttcttggtcatgcgttaccattatagttgtaatgcctagttttctatgtaaacttctaatctgctccctaagtttaagtcttacttttgcatctaatgcagataaaggttcatcaagaagtaaaaagtctggctctaaagcaatcgcacgagctaatgcaaccctttgttgttgtccacctgataattgtgatggatattttttctcatatccacttaattctacaacgtctagaacttctttaacttttttatcaatattagatttacttatgtttttattttctagtccaaaggctatgtttttgtaaacattcatatttggaaataatgcatatgattgaaaaactataccaaaatttctactttcaggtggtgaattagtcatatccttatcatttattattatttttccaccatgtttatcctcaagccctgcaattattctaagcagtgtactttttccacaaccacttggacctagtaaacaaataaactctcctttttcaatatcaatagatatgtcttttaacaccttaacttgtccataacttttacctacattttttacttgtaaaaaagacatttataatacccctcctaaagctaacctaaacttaaataaatcttctttatttaagctcttgcttccaagttcataattatgttgagaataaaatccgtggtaatctgagcctcctgtgaccactagattatacttcttagcataagaaagcgactctttttctagttctttgttgtgagatggatgatatacttctattccatctaatcctacttttaccatctcttcaatagcgctaaaattatccatttgacccgggtgagctaacacacaaattccaccagaattttttatagcttttattgcatctctgtaatccacatattttaaagatacatataccttgccgtttcctctatgaaacaattctttatatagacttgaatatatattatctgtatatcctttatctataagagctttcattatatgttgtttaaatattccagtctttgatgaatatttctttacatcttccaaagatattttgtatcctaaatctataattttatttaccatcttaacagatgctttatgtctgtcacataccattggattgcacaaattttttatttcttgactgtttaaatctatgttatatccaagaatatgaactctttttctatttttataatcataggctgaaatttctatacctggtattattgttattccataatgctctccaagcacaagagcttcatccaatccagataatgtgtcatgatttgttattgctaagatatttatattcttttctgctgctttttttattatttcttcagtagtaaaattattatctgatatacttgtatgacaatgtaactctgttagcaatttttatacctcccttttataaactgtttttccatttacaatagtatttaaaacctttggatattcactatcaatatctactaaaactaaatctgcttttttattttcttttatactacctctttcatcatatataccaactgctttagcaggatttgaggtaaataaactgactgctttatttaaattatttattctttctgcaactatacacatagactttatcatagctgatggaagataatccgaacacacaatgtcacaacaatcttccaatatagcatccattgcttttaaattgttattatgagatttacctcttacaatattcggtgcacctaaacaagttagaacacccaatttttttgaatgttttgcaacttcaagagttataggaaattcagatacatttatgcctatattttttatgaaatccattttttctaatgtatcatcatcatgtgatgcaacatttatatttttagttttggctatacctataatattagctattttattccaatctaaattatcatgcagatttactaaatcatctaaccatgtatctacataattttctgtaactccccacactttagtagcatactctttataaaatgttggatttgtatactgaccttgtcctggagaatggtccattattgataagtagtctattttattttcatctaatagttctaaaaccttttctaaaccttcataatacaacacttcatatcttaaatgaactttatgatttatactcttactatctatatttttatatgaatcaatatttttaatcatctttaaagagttatcaatacttctaactcctactccatcccctaaagatatagaatgataaactgtagttattccatttgcaggtagttttttatctagttcataaaatgccatattaaatggtaataatgtacttggtcttggctctatttccttttcaatggcatcactgtgaatatctataataccaggtattacatataagttttttgcatctattatttcatctatctcattaaagtcaaatgcgtaatcaatcctatcatttgatactttttttattgtatctccctctatgattaaatgaccattttctaaaatcatatcttctaatacaatatttgcattatgaattagttttatcatctaggctaccccactttcacttatagtcccttttgccatagtaaaggtcttatctataacagtttccataaactctatatcatgaaaaattcctatcattgtagttccttgacttttaagttccaacattttttcttttacatatattttagattgattatcaagtgatgcagttggttcatcaagtaacaaaagtctaggctttttaaccatagcttgagctaaatttaatcttaatttttctccaccagaaaaattatttggatacgcatcccataaattttcctttatttcaaattggttaagtatatcttttgccatatcatacgaacaatctttttcaaacccactctcaattaaagaatgtactaccagttcaattgcagttattcgtggaagtgtctttaaaaactgtgatacatatcctatttctttctttctaagatttatcatttctcggtctccaattttagccaggtctacattaccatatatttctgaattaaaaattatttctccagttgttggtatatatgttttatagatactttttaatatggtagacttacctgctccagatttacctattattcctaaaaactcaccttttgaaacttcaaaacttatattactacatgccgttatagtcttgttcaatgcatgtaactcaaagtctttactaaaattatttacttcaagtatagtttctttcattttattaaaaacccccattttgcttatttacaaacgatatttatagcaatgaatttataagttgctgagtatatgggtgttgtgggtcctccattatttggtctgtaagaccagactcaatcacacttccatttttcattacaattgtcctatcagcaagcatctttataacatcaaagtcatgggatacaactatcatagaaatcttaagttctctttggatttctcttattaaatccaatacttccgcttgcacagaaacatctaaacctgttgtaacctcatctaatagcaatattggagggttatttgaaagagcttttgctatttgaactcgttgttgcattcccccactaaagtattttggtttatgatctattctttctacaggtatattagtttttattaaaagttctttgcctctatctcttattttttcaacattatataaatttgccatcaataatttttctgctatattaccaccactactaaagtctaaatttaaaccaaggtggggattttgatacacaatacccataaaatgattctttatgtatctctttttttggtctgaaagctctagtatatttgtgtctttattgtaatgggatatatatacttctccactatttgcatgttcttggaaaaacagtatttttaataaagtgctttttcctgaaccagattcacctacaattccaaggacttctccttcataaagttctaaatttacattattacatgcaactatagaaccacaatacttacatatattattgctttcatatcctgtgctttcaaaacacttttcacacccatctccataaataagattgatatttcttcctattaatacttgcttgtctatattttctaatcttttagagacatttattttactcattccaagtacctcctattgtcacatctatactgttattttttaatctaactttttcacaataacttgtatctgagcaactatagtacttttcattagtgtcactgtcatatacttcatctaaaaatgtatttgtactgttacataaactacagtattttccttcaaacttttcctcttcaaacttataatcctcaaactctaaaggttctacctttgtatatggaggaatagcataaattcttttttctctacctgcaccaaacaagaataaattgtctgacatatttaatttttttatatcaaatctaggtataggtgatggattcattaaatatctatcatttactttacatggatattcaactgctatagatatatcattaaatctaactatatcttcataaagatatacccacatcctactataatcttcttctgaatgcattcttcttgtttctacttcactaggttctactattctaagggtttctggtattggtacttgaaatattagtatttgattagatttaagtttttcttctggtattctatgtctcgtttgaatcaatgtagcttctaatgtatcttttgtggtttctacattacttacacttgcaataaagctccttatattacaagcatttgtagaatcatcacttccttggtcaattacttttactacatcatttttaccaattaatgatagtgttaattgtaaacctccagtaccccatcccttagctataggcaactctcttgaaccaaagggaacttgataaccaggtattgatattgcttttaatatctttcttcttatttctttttttgtgttttcgtctaaaaaaccatagttatatatcacctaaacttacctccacaaactattttattctttctacatccgctttaaaatctacatagtgaggaagcttaaagtgagatataaatcctaatgaatctattccatctatatgaagcaatacaaattcttcatcttgtgctagtttttcactatttggctccaaagatttgtctagtatggccatagatatagccttattctcattattccccatacaaagaccatatcctaaagacatcttatttttatcttccgaattagttttagaattttcagtcttattttgtgatgcttttgaaactatttcacattcagtaaccagcatatcacctattattatttcttcatcttcatagatgggatgttttacttttataaatacattaccagttctaagttcacttatatatggatgttcatcaccaaaacctcttacaatagcataagcaaaacctgacactactccactttcacctctagtcaatgcctgtaactttgctgacctagaaactggaaatcttaaactatttcttgtaatatcatcaataacttcttccaatttgttttcacaaacttcttcttgtaataaattttcttttctaaatatattagatatttttgtaaattcagggatttcatctactgtttctaattcatttataaaactatctctaaaatctctattctttttttcatcttcttctaataattctacatttaatattctattttcatagtctctagttgccccaagatactgacctcctggtatatctttaaaagtagctgatattcttctttttattctcatttcttctgtatttatgggttctgaatatgtaattctaggcattgttgaccttaaagctcttacatagaaagaggcttctaatatatcaccttgagcttgttttatagccaatgctgatagttccttgttgtataaacttccttcagacattactttgtctacagcataagacatttgttcctcaatctgctttacatctataggcaagctatctccttttaccctataaaactcaagtatatttttagcctgtaatatggcttcttctccacctttaactgctacataagccatttctacaatacctcccaacttaattttgatgaccttggtataaatgcaatttctccttttttatctactaaaatcaaatctattcctattggataatctttatttatggtagataatctttctataaattcttctctaattccatttatatatatactatttttagattttataccaggaccactcaaatcaagctttatatacttagtttgagagtacgttgataaatcatttacttgatgtactatagttgcactttcatcaggatattcaaaagaacctattttaatctgtaatatatccacttctgaattaatatctaaaaatatataatctgattttctataatctatttgatttgacactgtaagcgctcttatattttttatatctttttgagtataattttctatatagaaggtaacttcttggtctaataaagtgattgctataccaattgctccattcaatagttttgtattattttctatatttatattatctatattatttaatttcccaggaaacgaagcactatctagcatctttctatatatttcttgtgtataatttaccatgattctcctcctatttaatccatagcattgaattgaactttcgttttattaatcaagctaaattcatcaataatctcttgttcataccttaagttctcttcatatacacttttatttatgtaattctttaactcatcaaatttactgttattgctatgtaaaactgcatctataactgctaagtaaatggctttcttattattgttttctgaaactattccgtaacccaagctttcatctacctttacactacattcagtaactaatatctctcctaaattaaatgttgtattttttacactttcattagctcttaccattactgtagccaagttaggttctttaattatagaaatacttgatgtatcttttatcattgagtatatcttttctagtttctctaagttcatatttatcaatatcttagtactatcaactgtatacaaaatttagcctccttaatctacctttcgtttacttctctttaataatataataaaccacttaagttaagtgaatattagagttgagttaattctaatgaatatcttgtaaattcttttttaacaatgttaagaaaatatattttaaaatatgaattaaacaaataaaaacaaactgtctcaaaatatgataaacttctttttcattgttgaaatgatgaaaatatatttgatttcataaaaaaagagtgcctcatgaactaaaaaactcattttgaggcactctcatcctatacttataatgacttattatatatatcattataagatttaatttgtctattttatattaaaaaatttctttgcattttcttttgtaactctacatacttcttcataacatatccctttttcctgggctatcttatcagcaacaaaagatacttgagaaggattgtttctctttcctctatgtggctctggtgacatatatggtgaatcagtctctatgaataatctttctagaggtatttctcttactacttctctagtttttttattattcttaaaagtaaccgtgcctggaattgatatataacaacccatcttaacatattctctagctaactctacatttccactataacaatgaagtacacatcctatttcaggatttttagtattctttattatctcaaaagtatctccatgtgcatctctatcatgtattattattggaagttttagctcattagctaattcaatttgcttcttaaaccactctttttgttcttctcttggagaataatcataataataatctaatccaatctctccaatagctacaactttttcattctcagttgcaagttttcttagagtttctattgctgtatcatctagttttgatacatcatgtggatgtaccccaactgctgaatatataaagtcgtattttttcgcaagttcaattgctgttatcgacgtctctatatctgctcctggatttacaaccaaatctacacctttatcttttaatgaaccaataagttcatctctatcttcatcaaaactttcatcatttaaatgtgcatgtgagtcaaataacatctttaatctccttactatttaattacctactaacgaacctcgcatccatctttagccccttgtgtaaatggtaaaacatatgggtctccatcatcacctgctgctaatatcataccttgagattctacacctcttaatttaactggttttaagttacataccactgtaacctcttttcctactaaatcctctggcttatagtattcagctattcctgatactatttgtcttgtttctggtccaatcttaacttgtgatactaataatttatttgcttttggatgtttttcacagcttattattttccctactctaagctctattttgtctaaatcatcaatagtaatttcttctttatgctctaaaggtttttcttctactggaggtttcccagagaacattttagttaattcttctatctctttttctacatctaatcttgggaataaaggttcacctttaaatacttttacattttctccaataagaccaaatgtttttgtactttcccatgtagttatatcatcttgaccttttattcctatatgttcatatattttattagcagtctcattcattataggatttattagtgttgcgattattcttatagattcacataaattatataaaactgtgtctaattcatctttcttcgtttcatctttagctagtgcccaaggcatagtttcatctatatatttgttagttcttctaactaatttccatacactctctaatgcttcatggaattgcattttatccatttcagcttcaaagttttctctagttgaaacagcttgttcttttaagtcagcatcaaaatcagttgaaacttttgctgttggtattataccattattgtatttttcaaccatagctacagttctacttattaagtttcctaaatcatttgctaaatcataatttattctcgttacaaaatttctatgagtataacttccatcttgcccaaatgcaaactctcttaataagaagtacttaagtgtgtctattccatatctttctattataggttctggataaaccacattaccttttgatttactcattttatcatcagcaaatagtatccatccatgtccaaatacttgttttggaacttctagacctaaagccattaaaagcgctggccatattattgtatggaatctcactatttctttacctactatttgaacattggcaggccaatattttttaaattcttcatcattatcagtcatataacctaatgctgttatatagttacataaagcatctacccacacataaattacatgtttttcatcaaaaggaacttttataccccagtcaaaagtcgttctagttacgcttaaatcttctaatcctttgtctaaaaagtttgccaccatttcattttttctagcagcaggaaaacagaaactatcatctttaaataactcttttaatctgtcttcatatttagataatctaaagaaataagattcttcttttactaaatatgtttctcttccacagtcagggcatttatttccttctagtaattgagattctgtccagaaactctcacaaggagtacagtatctaccttcatattcacctttatatatatcaccttgctcatatagtttagtaaatatcttttgtattatgtctgtatgtcttttttctgtagttcttataaaatcatcataagatatatccatagtattccataaggcctttatatcttttatcattccatcaagatactctatctctgacattccttgttctatggctttcttttgaattttttcaccatgctcatctgttcctgttaagaactttacatcatatccacagaaacgcttgaatctagctattgtatctgcagctactgttgaataagtatgtcctatgtgtaatcctccacttggatagtatattggtgttgttacataaaaactcggtttgctcatgttatttacctcctaattttttatcgttcgtaatcatatgattctttcatttaaataataaaaaatcgcctcctatgagttaacataggggcgagattattcacggtaccaccctaattcatctataatagttatgtttcacatgaaatgtagaaacattttatagataccttagtagactataacgtgtccaaccgttttaccctagcacacttgctcagataaaaagctccaagaccatcttcaataaagcttttgacactagctttcacctaacctagctctctgatagaaaaaacctttatttactcttcttttcatagcttgtaatttgtattactatttgtttctatataatcactatattataaaatttttcccatattgtcaacaaattatacaaatattacatagcaaataaaaacagctgctatgacacctgcaacatggctaatcatagcacatgataatgtatgtctagtattttttatcttcagacttccatagtatattgccattgtgtaaaaaatagtctcagaagaacctacaatcgtagcacccattttttctactaaacttcctattccaactctatttgcaagttcactgtacatccctaaagcaccacttccagataaaggttttacacttattagacctattaattcttttggtatactcatcatatttgctattggtgtaaatagccattctaacatatcaagacctttaccagttttgaatattcctattgccaaaaatatacctattatatatggtaggatatcccatgctgcttttaatccatcaattgctccttttacaaaactatcatacacatctatttttttatatttaccataaactactatgtacagaattattattggtataagtaagtttgaaaatatctccatgtatctacatcccctttatctatatcttctttgaaaaaatttacatgttattattgctactgctgtagatattatggttgcaaataaagtcgtaaaaattatttcacttggattttgagcccccatatccatccttaatttgattatagtaaatggaattatttgtatagatgatatattgattaccataaacataatcatatcattagtggctgtatctttcttgttattcaaagtttgaagctcactcattgcttttaaaccaaatgctgttgcaccatttccagcacccaacatatttaaagcaatattcataactatataagacattgctttatgaccctttggaatagaaggaaataatcttctcattataggatttagtttttgacctatcttttcaattaaacctgattcttttgcgatattcattatccccatccagagtgccatgataccagctagacttattgcaaactctataccttttgatgtttcacttaatataactttatttaattcacccatatttttagaaatcaagcttcctattattcctatcgataccatataaaaccatatttttcctattataatcatcctcctctttaaataattttatgatagttaggtaatactttatacttgaaagttgtactatattatgttttagtataagtgtgggagtttttacaatttttaatatttaataataattaaggagagaaataatgagaaatctaacacttcttactgatttatatcagcttactatgttaaatggctattttgaaaagaatattcatgaagacattgttgtatttgatatgttttttagaaaaaacgcttgtgatggagggtatactatagtttgtggtattgatcaggttgttgaatacatagataatcttcatttttcagatgaagatttagagtacttaaaaaacttaaatttattttctgacaagtttttaaaatttttaaaagaatttaaattcacaggagatatatatgctgttgaggaaggaactatcatgttccctaatgagccattaattactgttaaggcacctttatatcaagctcaacttattgaaacagcattgttaacaatagttaattttcagtctcttattgctactaaagcctctagagtttgctttgcagctcaaggagaccctgtatttgaatttggattacgtcgtgcacaaggtccagatgcagggatatatggagctagggctgctgtagttggtggttgtgctggaactgcaaacgtactagcagggaaaatgtttgatatacctataattggtacacaagctcacagttgggtacaaaaatttgataatgaacttgaagcattccaagcatatgctgatgtttatccagataaatgcctactacttgtagatacttatgatgtattaaacagtggagttcctaatgcaataaaagtattcaaaaatatttctgaaaaaggatacaaacctatgggtataagacttgactctggagatttagcttatttatctaaagaagctaaaaaacaattagataacgctggcttttcagatatcagcatcactgcatctaatgacctagacgaatataccataacatcacttaaagcagaaggagctactataaattcatggggagtaggtacaaagctcattacatctttcgattcaccttctcttggaggagtttataaattagctgcatcttgtgaaaaaggagttcttgaacctaagataaagatttctgagaatccagaaaaaataaataatcctggttacaagaaagttataagaatatataacgaagacaataaggcagaggcagatttgattatgttacatgatgaagttatagatgagtctaaacctttagaaatcttccatcctacttatacatggaaaacaaaggtatttacaaattacaaagttaaagagcttcttaaaccattgtatataaaaggcagatgcaaatataataaaaaagctgttcttgaaataaaaaatcatgtacaatatgaattaagtactatctgggaacaatacaaaagactttcaaaaccacacatttataaggttgatttatctagaaatctttggtatttaaaaacacaaatgatagattctaaaaaagttttatagtattaattatttttatttaagggggactgtttatttatggatgttacagattacagaatcatagaaattttacaggatgatgggagaatttctatgaaggacttaggaaaaatagttggtttaacttctcctgcagtttcagaaagagtcaaaagattagaagagtctggtgttatagaaggatataaagctattgtcaacccagattcattaggcagagttataaaggcatttattcatatttctcttccaagcaatggatatacagaatttattgagtcagctgcaaaggaccctaggattgtagaatgtcaccatataacaggtgatgattgcttacttttaaaagtaattgtaaaagatatgtacgagctagaaaatgtgattgatactataaagaaaattggttctactaagacctctgttatactatcaacgccaatacaagcaaaatcaatattgtaatataaattaaatactaatggtttattaattaatagaccattaagtatccttaataaaatttcaatttttgatataaaaaaagttgtctttcataattttacaacaaagacaacttcttttatgtttttgaaatccgtatatttcaaacttcaattaatcatctaaaactcaattatattaactaaatttatacatgtgtataattactcttatacaagtaatttgttaaaatatattccatatatgtctttaacacactgacttctccactcttgcccaataattttactgtagacactatatctgcatacccaagcattattacacctatagtgtcctcatctactaagttaaatacattaattaattctttcctactcaaatcatttttcttatatagagacaaaagtatcatatgatatcttacatatttacttataagtctatatgtctctgttgataactctaactttattcccatattgtcaattatttgagcacctattttttcatgatttgtgaaatgaactcttccggtttcatctaaggtcatactatcaggcttacctatatcatgtaaaaatgttcccaactttaatacatgtaacttatttattccttcttcaatatatgtgtttaaatagtttgacacatgttttcttagatgtattggaaaaaaatccttatcatttaatactatttctaattcttttaatgcatttatagaatgttcaaaacaatttactacatgatatttacattcacctacagacttcatacagcttattttaggaattattttttctaattcatgcttattatctaattctataaatattttatgtgtatcttccctctttaaactctctattataattttccctatttccataaaatcacctcagattcaggttttataaatctaaaacttgtttataaaccacatctttctttaactttctatctttacaaactatttttattgcatcttttttgttcataccactttcaattagttttaaaacatattccctatctgtaagcccatcataattttctttctttgacttctcaccatgaaaaccctctactattaatacaaactctcctcttacttctttttcctcaaatatttttatggtagtttctatattttctcttattatttcttgatatttttttgtaagttctctatttatagaaatattcctattaccaagaattttaagcatatcttttagtgtatccttcaatctatgtggtgattcatagaaaattatagttctactttcttcctttaattcttccaattgtgctttcctaacttttttatctctatctaaaaagccctcaaaaacaaatctatgtgtgtccataccagagccaactaaagccgttacaaaggctgttgcacctggcaatacttctatctctatgttattttgtatagcttgttttattatctcttctcctgggtcagatataccaggcatacctgcatcacttatcagagctatattttcaccatcaattagtttatttatcaaataatctccctttgaatccttattatgttcatgataactagttagtggttttgagatttcaaaatgatttaaaagttttatactatgtcttgtatcttctgctgcaatcaagtctacttcttttaatgttcttaaagttctatatgttatatcttctaggtttcctattggtgttggacatatgtacaatttcccactcatttacaactctcctatatctttattattatatattgcttttaattcttttgtataattcccatcttctccataaacatacaatgggtccaatattttaagctctggtcttccatcttttacaaattgaaccaaaactaagttcggtgctttttgaggtcttggatgcacaaattgaataacctttggttctaatttatattttctccctaaagttattatatcaaccaatcttgttggtctatgtatcatgaagaattttcctctaggcataaccaatctggatgaagctctaattacatcttccaaattgcaccttacttcatgtcttgatattgcttttttatcatttggattttttattccatcaatatgcatatatggaggatttgatgtgactacatggtaaccatttatgtctaagactttgtctatgtattttatatcttcatttataatctcaactctttcttctaatccatttaattttatagaacgagttgccatttcatatacatcttcttgtatttccacgccaataatttttttagcttcactttttccagctatcaaaataggtataattccagttccagtacccaaatctactactttggcatctttttttattttagtaaaattggctaataaaactgcatctataccaaaacaaaaaccattagtatcttgtataattttaaggccttttaattgtaaatcatctattctttctgaatcttttaattgcatatataaattctcctcaaatattaataactttaagcattaattgctttaaaaaaggtaggaaaagccctaccttaaatttaatcttctaatttctttagctctcttagtgtggcttcatctaatccatcattatccttacatttaccaccacagccatcacattttttaggctctctaagtatttttatatcttctcttgtgtatatctttactgtcttgtcttgaaattccactttaatttgttctaataaaggattcacttctacaacttttccttttccatcatctgattgcaccaatgcacctacaacaggcattttttctattgcttcactatatacatcatgctcatattttaagcaacagaataatctcccacatattccagatatttttgttggatttagagatagactttggtcttttgccatttttattgaaactggttgaaaatcacctaaccaagatgaacaacaaagttttctaccacaaggccctagacctcctatagatttagcttcatctctgacacctatttgtctaagttctattctagttttaaatatagcagctaagtcttttaccaattctctaaaatctattcttccttctgctgtaaagtaaaaaatcaacttattcctatcaaacgtatactcacaatctattaaaaacattgttaactcatgttcttttattttttgttggcacaactcaaaagtttcttttgccttttccttattttctagatatacttttttatcttcttctgtagctattcttataattggcttcaaaggagaaactaattcgctttcatccatatcttttggaccaacgactactttcccatactccaagcctcttgcagtttctacaactacatccatatcttgctctatattaaaatcaacagggtcaaaataatatattttcccagcacttttaaaccttatacctactatctttatcatttaatcacctcgtatatatttaaagacataacttgtatgcttatattgaaattgcaattgctttttattttactctttgcatcttctattatatcaataatcttggacaattgagaataactaatttttccactcatattttgaatgaaaactagcttatctacatttattaacatgttcttgtttacattttcttttaataggatgatatctcgaaaatagtttatcatcatatctaataaagctataatcttacctctatatttttccatattgtttggtatatttaaaatctccactatgtttttatctaacattatctgaatatactgttgtatatcttctctcatcattgaaaactcagaagactgagatagatttagagcattctcaatacttcctctcgaaaaaatagccaataattgagctctttcttcttctatacctgtatttatcaaataacgttttaagtcttcaattggtataggtgagaactttattatatcacatctagattttatagtttctaataaagattccttgttgtttgtgactaagattattatagcatagtttggaggttcctctagcgtctttaaaagtgcattttgagcttccacagtcattttttcagcattattgattatatatattttatagtctttatgaggtcttattactatatctgattgtaaatttctgatttgagctatttttatactatttccatctggttttatgagtacatagtctggactattttcgagattttcataatcaagtaatagttttgataattcatctgcaaatttcttttttcctattccatccattccttcaaacatatacgcattattaagtttatttttctttatagaatttgttaaatatttctttgcaaaatcttgccctataatattttcaaaatacatatttatctctccataggttttattgaatcaagaactattttataaatttcattatgtatactttcaatacttcttaatttgttatctaaaacacaatttatttttttccaatcatatttatctgctatatataaagcattgttgtaagatttctctaaatactctatgtcactttcatgaatatcctttttttcttcccctgtaattttattttttctattctccataagctttttactaaattcaataggcacatctaaaaatataacacaatcaggttgtggtatcttaaataaattaaattcataatcagctaaccaatttaaatactcttctctatcacaaatatccattttagaggcctgatgtaccatattagaggttgtatatctatctgcgataattattccaccttcattgtaaaactcctcccaatcggttttaaatgatgcatacctatcagctgtaaaaaaagttgatgctatatatgggtctacatctgatgcatttttaccaaagtctccttttaggtacattttcactaaggcagatgatggagattcataatttggatattctacctttttaatcatatagccttctttttttaatctttcatataatatttctgtctgagtagcctttccacttgcatctgaaccactctctataattattaacttacctttcattttcatatcctccatacaaacactttttacttttttagtacttttattagatagctctatataagcagtctatttatttctcttcacaattttaaactatctacttctatctacttttatatcataatttttaaatgtcttctaaatctattacttgtataaaatttaaatctacatctttcaatccactcacaatcatgcctttagaatgacaaaacattagatagtctattatttctttacttattacttcaccaggagatattacacttattccaggtgggtatggaactatacattcaccacaaattttacctatgctgtcatatattttaacactttttttagttttataaaatgcttctctaggtgttaatattttctttggaataacaacagggtattttttattttctaacttttcaaatttaaagtcttcctttacaacattgtttaatgctgtttctaaactagagaaatcctcagcagtatttcctattgtacatattaaaagaactccataataattagataactccacttgtatgttatatttgtttctcaaaatattttctagttcataacctgttaaacccatgtttttagatgatataaatatttttgttttatcatttgtgtcatatatattaatatttgaatcaactttatctttgaaaattctaatattatttaaaagctcttccattaattcttttcctttattttcatatatatctactgctaattccagagaagataataataaatatgaagggcttgaagattctgtaattcttaacatgttcaatattttatctatatcaactcggtctccctgtatatgtatcattgacgattgtgtaaatgctggaagagttttatgtgtactctgtacaactatatctgcaccttgctcaagagctgttttaggaagcctctcactaagccctaaatgcgcaccatgtgcttcatctactatcactaccatctttttgctatgtgcataattacatatgtattctaaatcatatgtcattccataatatgtaggataagtaagcagtactgcttttgcatccaagtttttatctattatatcaatcacattacttatagatatcccttttaagacatttgtctcttcacttatctcacaaggcacatactctatatctatatctcctaaaatacatccatttataacagactgatgacagtctctatttgttattattttacttttaggactacatactgacattattgcagattgtattccacagctactaccatttactaaatagcaagtataatcacttttaaatactcttgatgcttttttttgtgaattttttataattccttccggaaagtgtaaattatctgttcctaatatctcagttgtatccattttatacaaattttttagtatatctttatatcctaactttttataaacctgtccctttttatgaccaggcatatgaaaagatattacttcttcatttacaatcttatttaattcattaataataaacatatattaatagtactccttttttacataatacttctttttaaaacttcaattcttatctattttaccattaaaaaagaaacaaattaatatttttataaaattaaatacctcattctaaacatttagaatgaggtatttaacataaaagcataaattattctctatcatcagacattaaacttggtattaagtataatccagctaaacctacaatgaagtatattattctacttaccatttcatatgttccaccaaagatactacctattaagtctgtacctagaataccaattgcaccccagttaagcgcacctattatagctaaaattaaagcaacttttttcacttatatcactcctcaagaattaaatttttataaagtccataattcctgtgtttagttttcccgaaatgaaaaaataaatacgtattttttgttttttttgacaaaaaataaaaaaaattacgtggctacgtcctactctcccaggcagtttcccaccaagtaccatcagcgctagagagcttaacttctgtgttcggaatgggaacaggtgtatcctctctgctattgtaaccacataatctttatgcttaatatttctattaagtttttaataagtttatagaacctagtaatactagtttctttagagttagcactctaaaaactacacatatatcttaatgaatgaacatcaaataaatattggtcaagtcctcgacctattagtatcgataagctaaatacattgctgcacttacaccttcgacctatcaaccagatagtctttctggggtcttacccttgcggtgggaaatcttatcttgaagttggcttcgcgcttagatgctttcagcgcttatccattccgtacatagctacccagccatgcccttggcagaacaactggtacaccagaggtacgtccatcccggtcctctcgtactaaggacaggtcttctcaaatttcctacgcctgcgacggatagggaccgaactgtctcacgacgttctgaacccagctcgcgtaccactttaatgggcgaacagcccaacccttgggacctactacagccccaggatgtgatgagccgacatcgaggtgccaaacctccccgtcgatgtggactcttgggggagataagcctgttatccccagggtagcttttatccgttgagcgatggcccttccacgcagaaccaccggatcactaagtccgattttcatccttgctcgacctgtatgtcttgcaatcaagctctcttttgcctttacactctacgtacgatttccgaccgtactgagagaacctttgagcgcctccgttaccttttgggaggcgaccgccccagtcaaactgcccacctgacagtgtcccaagaccagattcatggcctatggttagagtcccagtactacaagggtggtatcccaaggatggctccgccaaaactggcgtcctggtttcaaagcctcccacctatcctgtacatgtagtaccaagacccaatgtcaagctacagtaaagctccatggggtctttccgtcctgtcgcaggtatccggcatcttcaccggaattacaatttcaccgagtctgttgttgagacagtgcccaaatcgttacgcctttcgtgcgggtcggaacttacccgacaaggaatttcgctaccttaggaccgttatagttacggccgccgtttactggggcttaagttcactgcttcgattgctctaacagatccccttaaccttccagcaccgggcaggcgtcagctcctatacatcgtcttgcgacttagcagaaacctatgtttttggtaaacagtcgcttgggcctattctctgcggccacctgatggtggcaccccttatccctaagttacggggtcattttgccgagttccttaacaacagttctctcgctggccttaggatactctcctcacccacctgtgtcggtttgcggtacgggtacctttaacctcgatagagacttttcttgacagtgtgaaatcagctacttcgctactaaatttcgctccccatcacatcccagcattatcaaagcggatttgcctactttgactgcctcaatgcttgggcacacataaccaacagtgtgcttagcttatcctactgtgtcatcccttctctcaaacggttatcggtagtacaggaatatcaacctgttgtccatcacctacgcctttcggcctcagcttaggtcccgactaacccagggcggacgaaccttcccctggaaaccttgggtttacggcctgtgggattctcacccacatctcgctactcatgccaacattctcactcccatactgtccacatgtccttacggtcatgcttcaacccgtatgggaagctcccctacccatcattactgatgccgtagcttcggtagtaagttttagccccggaaatcttcggcgcaggatcactcgaccagtgagctattacgcactctttgaatgagtggctgcttctaagccaacatcctggttgtctgtgcaatcccacatcctttaccacttaacttacatttagggaccttagctgacgatctgggctgttgccctttcgactatgaatcttatcacccacagtctgactcccaagtataagatgacggcattcggagtttgatagtcttcggtaggtgcaataccccctaggacattcagtgctctacctccgtatctctcaccttgaggctagccctaaagctatttcggggagaaccagctatctccgggctcgattggaatttcaccgctacccacaagtcatccccgagcttttcaacgctcgtgggttcggacctccacgaaattttactttcgcttcatcctgctcatgggtaggtcgcccggtttcgggtctacgtcaagtaactgaacgctcagttaaaactcgctttcgctacggctccgcaccttaagtgcttaaccttgctacttaacgtaactcgttggcccgttctacaaaaagtacgcggtcacacaagaaatgtgcttccacagcttgtaagtgcagggtttcaggttctatttcactcccctcccggggttcttttcacctttccctcacggtactatacgctatcggtcactaggtagtatttagccttggagggtggtccctcctgcttcccacagggtttcacgtgtcccgtggtactctggatcatatctgaagtcttctcgtttaacatacaggactattaccttctgtggtgggtctttccaaacctcttcaattacgatacctcttcgttatgatatgtccgcaaccccaataaagaaaactttattggtttgggctaatccgcgttcgctcgccgctacttacggaatcgaatttctttctcttccttcaggtacttagatgtttcagttccctgagttcccctcattaagctatgtattcacttaatgatacttagacattactctaagtgagtttcctcattcggaaatcttcggatcaaagtttacgtgcaactccccgaagcttatcgcagcttatcacgtccttcatcggctcctagtgccaaggcatccgccctgcacccttaataacttgaccagttaaaaaggtttgatagattagaagctatcaacttcgataattttaaaaagttatcagctttatatattacaaattagatgtcatatcactaaatatatatgcagttttcaaagtgctaaagcacggcgccaacggataaatcccgttgctaaaagtgctaattttgagtattcgtaaaaacgaaccctcaaaattaaacagtaggtaattctccttagaaaggaggtgatccagccgcaccttccgatacggctaccttgttacgacttcaccccagttattgattccaccttcgacgacttcttccaaaaggttagataatcggcttcgggcgtctccaactcccgtggtgtgacgggcggtgtgtacaagacccgggaacgcattcaccgcagcattctgatctgcgattactagtaactccagcttcatgtaggcgagtttcagcctacaatccgaactgagagtagctttaagggattagctccaccttacggcttggcaaccctctgtactacccattgtagcacgtgtgtagccctaagcataaggggcatgatgatttgacgtcatccccaccttcctccaggttatccctggcagtctctctagagtgcccaacttaatgatggcaactaaagacaagggttgcgctcgttgcgggacttaacccaacatctcacgacacgagctgacgacaaccatgcaccacctgtcaccaatgtccccgaagggaactctccgattaaggagatgtcattgggatgtcaagcttaggtaaggttcttcgcgttgcttcgaattaaaccacatgctccgctacttgtgcgggtccccgtcaattcctttgagtttcactcttgcgagcgtacttcccaggcggagtacttaatgcgttagctgcggcaccgaagggggtaacccccgacacctagtactcatcgtttacagcgtggactaccagggtatctaatcctgtttgctccccacgctttcgtgcctcagcgtcagttacagtccagagagccgccttcgcaactggtgttcctcctaatatctacgcatttcaccgctacactaggaattccactctcctctcctgcactcaagtctcccagtttcaagagcttactacggttgagccgtagcctttcactcctgacttgaaagaccgcctacgcaccctttacgcccagtaaatccggataacgctagccccctacgtattaccgcggctgctggcacgtagttagccggggcttcctcctcaagtaccgtcattatcttccttgaggacagagttttacgacccgaaggccttcatcactcacgcggcgttgctgcatcaggctttcgcccattgtgcaatattccccactgctgcctcccgtaggagtttggaccgtgtctcagttccaatgtggccgatcaccctctcaggtcggctactgatcgtcgccttggtaagccgttaccttaccaactagctaatcagacgcgggtccatcctgtactggctcacctttgatattcaagagatgcctctcaaatatattatcccgtattagcatacctttcggtatgttatccgtgtgtacagggtaggttacccacgcgttactcacccgtccgccgctctttaccgaagtaaatcgctcaacttgcatgtgttaggcacgccgccagcgttcatcctgagccaggatcaaactctcaaataaaagtttatcaggctcagatactattgttatcaaaatatctggctttatggtttgtttcttgttttataaattaacctactgtttaattttcaaagttcattttttatgtttgcccttttcttaaggacaagtaatactatatcatcttaaaaatatttcgtcaatactttttttgttttttattttaaaaaaggttataacttttggtttttttaataaatataattaaaactaatagatataacccttgatattacaaacaatacatgcatatataattttacctattttgcaattttattttcataagaatatgaattagctctcactctatctgcccaaatatttatactcttaactttattaacattagttgtaccctcaaaaatatccattgcatccttacaaaaatatatcataacatcaagaaccaaaaatccaacacaaaataaacataaaaaattaattacttgaaacatcagacattcccccaataattttttatatatagtattctcataaattattctttttaccttctcataaattattctaaatattttcataataaattactttcaatcatattttctaaatataaagtctcaatcaacaaaaactaatatcaatttctaacgtttgttggtaatttataaattaaatatctaaaagaatctttgaagcatataaaaagcattctacactgacattttaaacaaaatttagctatttattgctaatttaatagctaaactttatttaaaacttagtagaatgctaatatttcttagttttcttcttctttatttggattgttatcaataggtttcatagtcgggaataataatacatctcttatagatggagagttagttaataacataattactctatctatacctattcctagtcctcctgtaggaggtagacctacctctaatgcttttaagaaatcttcatccatttcaaaagcttcatcatcacctaattctctttttctcaattggtctataaatcttcctttttggtcaatagggtcattaagttcagaaaatgcattagctaactcccacttattagcaaatgcctcaaatctatcagttcttcttgggtcttcaacatttctcttagataatggagatacttcaactggatgatgagttataaatgttggttggattaatttatcttctccaaattcttcaaagaaagcatttattacttctcctcttctcattccaggttttatctctatacctttttctctagcaacttctagtgcctcttcatctgtatttatagtagaaaaatctacaccagaatattctttaacacaatcttccatactcattcttttccaaggtggtgtaaagtttatttctgttccttgatagttaactatcatacttcctgtagcaacttcagccatatgtgcaataacattttctgttatttccatcatatcagtatagtctgcatatgcttgatataattctattgcagtatattcaggattatgttttaaatccataccttcatttctaaacattcttcccatttcataaactttatcaaatccaccaacaataagtctttttaaatacaattcatttgctattcttaaatacattggtatatgtaaagtattatgattagttataaatggtctagcatttgccccacctgctatagtatttaatattggagtctcaacttctaaaaatcctctatcatctaagtatgctcttaatgcttttaatgcttttgttctaattaaaaaagcattttttacttctggatttactattaagtcaacatatctttgtctatatcttagttcttggtcttttaatccatgatatttttctggtaaaacttgtaaagatttacatagtaatactacagatttagcctttacagatatttcaccttttttagttttaaagatttctccttcaattccaactatatctccaatatcatatgttgaaaatacactatattcttcctctcctatagcatctagtcttacataagattggattcttccctcttggtcttgaatatctataaagccagctttcccttgtattctcttgctcattatacgtcctgctatttttgtagttttaccttcaagagaatcaaagttatcttttatatccatagaataatgagttctatcatatctactttctttaaaaggatctctacctgactcttgtaatttttttagtttatctcttcttacttgaagtacttcactaaggtcttcttgaatttgcgcttcttcattgctttgttgattatttttcatttttttcctccaaattatcttcttatttctaatatttcaaacttagcaactccatcaggaacttgcacttccacaacttctttcgcagctctacctaaaagtgctttccctacaggagattcgtttgatattttaccatcatatgggtctgcttctgtcgaaccaactatagtatattcaacctcttcatcaaattctaaatccttaactttaactattgatcctattgtaacaacattaaggtctattttgctttcatctatgataacagcttttctaaccatattttctaattttaaaattctttcttcaacttgtgcttgttcctttttagcttcatcatactcagcattttcagataaatcaccaaaagatatagcaacttttattctctctgcaacttcttttctctttacaacctttaagttttctaattcttcttctaatttatcatatccctcttgtgtcaataaaaactctttattttcttccattataaatacaactccttcacaaatttcttaggaattttcctaattatattttaaaaattttataatctttttttaatttatgcgctatattataagtcactattatttttatgtcaaggagtcttccatatagtactccaatttcgacacaacttcttgatagtcttctattttgttaatttcatcccttaattttgcagagtttctaagtccttttaaataccaagcgatgtgttttctcatttcccttacagctacatactctccatgttcttctactgcaagttttaaatgcttaatggcagtacttattttttcgttaagagttggctctggcaaaatctcgcctgtattcatataatggtttattcttttaaatatccaagggttaccttgagcacccctacctatcattatagcatcacaaccagttttgtctaacatatttattgaatcttctattgtaaatacatcaccatttcctataacaggtatactcaaatttttcttaatctctgcaattatatcccagtctgctttgcctgtataaaactgttctctagttcttccatgtattgctaaagcgcttattccacaatcctctgctatctttgctatttcaacagcatttacactattatcatcccagccttttcgaatctttaaagtcactggcttttttgagttcttcactactgccctcaatacctcttctgcaagcttaggatttttcataagtgctgaaccatctccatttttaactacttttggagctggacaccccatatttatatcgagaatctcatttgaataatcattcattatctctgctgctcttcccataaactctggttctgaaccgaatatctgaactgctacaggatgttcttcctcttctatcttaagcatttttttagtattttcatcatcatagcaaagtgccttaccatttatcatttctgtatataaaagcccacatccctgttctttacaaattaatctaaatggaaggtctgttacacctgccataggtgatagaaaaactttatttttcaattctaaatttcctattttcattgtttttctcctatttttgcctttattttgtgatttaactttaaattcttatttcctcattataatataccacatatagctagaaatctatcataaaaagggaattggatatataacccaattccctgtatattaattattcttggtttttttcatatattattctcaatccttctagtgttaaaaaaccatctacataatctatacttttcgtctctgaagcaatcagtttagctaatccacctgtagctataaccttaacatcatcacaattcaattctttcttcatcatacttattattttgtcaactaaaccaacatatccataaattattccagattgcatggctgatacagtactcttacaaatagtcatacctggcttagctaattctactctaggtaatttagacgcactttgaaataacgcctcactagatatttttattcctggtgctattgttccacccaaatattcacctttttcagagatagcacaaaatgtagttgctgttccaaaatcaacaagtatacttggtgctccatacttttctatccctgctacagcattaactattctatctgccccaacttgttttggattatcatattttatatttagacctgtttttatgcctggacctactattaatggctgttttttacagtactttatacaaaagttttcaagagaatgcatgacatttggaactacagatgatattataacatcatcaatatcacttatattcacattatcataatcaaataggttacttatcaggattccatattcatcagacgttttttccctatctgttttaattctccagtaattaactaatttgtcacctttatatatacctaaaaccatattagtatttccaacatcaaatactagaagcatatgtcattaaccttctttctattttttgcttttcttaagtacagtggcaacagcagctactactaaagcccctactattgcttctggcaccccatttgctgcggcaagagccattattacttttcctgctgaaccacttttacccattgcatgaagatacttgtcagcatataagacatatatcattcctaaaactccagctgtatttaacagagaacctattgcccctgtaattaaacctgatatgtataccttatttgtagccttaattattaactgatatacataataagctaatacacctatcataactcttggtaatattgaaactaatggatttataaaaacaaaagatgttactgttgggtttgttatagcatttaagagacttgatatcccaaatataaatcctattgctgccccaactattggtccttccataatagctccaataataactggtatgtgcattatagttgcttttgtaggtccaactggaataaatcccaatggagtcatagatagcataatagaaatagctgatagtactcctattatagtcatctttcttacatttacttttcttactgatgcacttgtgttcatcataaaaaatacacctccgttccagctcattaagatgccggactacttaattttttaatttttttcgtttttttcttataactatgagtcaagctaccattgtaggatgcccgctctaacaagaataattttatcaagatgagttgccattgtcaacaatttgacaagaaaaatatgctaatttcatcatatttctcgtttttttactatatctttatatgccattatattttctacactatccgctttttttactgcatttattatacttttttccacaacctctacagccaatgaacctactaatgttatatctgcttctatttctcctgttgatattgtgaatattgtatctccatcatgaggtgtatggataggaaaaatagacttagcatatccatcatgtcccatttgagatatctttttacatccagctttggttaacttagcatttgttgcaattatcccaattgtagtattatctacactaaatccacctttactttcaccttgtttcattaatttatatgtatcaattgtttctgtctttttatcatttaaagcaccagctataaccttaccattttcataaacatctccaagagcatttacagcaattaatgcagatacaattagaccattatctaattttatagaatagctacctattccgcctttcatagcatattcctgacctcttatttttccaacagtggctccacaacctgctccataatttccttgatttaaaatatcagtatttgcaacttcacaagctctataacccatctttaaatctggtctacatttaaagctccctactcctaaatcaaataaaactgctcctacaactataggcactttacctacacctacatcaaagccaattcctttttcttctaagtatctacttacaccacaagtggattcaagaccatatgcagaacctccagccaaaactactgcatgaactttttgaaccatatttacagggtctaataaatcggtttctctagtccctggagcagaaccccttacatcaacaccgcaagtagctccttcttcacatattactactgtgcacccagtaagaccatttctatcctcaacctgcccaacctttaagccttctatatccaaaatattattatacatatcctttttctcctcttatagaaacttcacctgaaataatttcttttatacttccatcacttctttgaactaataaatttccctcttcatttatgtctaaacatttcactagttctctattatctccttttaatacatatatatttttatctataattgcagaataatctctacatatttttaaggttttttctttggaattatttacagtataatctaaatataatttttcaaattcagtcaatacattcctaacaatatctactctggataacatatacccttctttatacaatgatgtggctttgtcagctatttcttgttcaaaatccattattttaacatttattccaattccaagaacaacataatttgttctttcaatttcagcagataactctgttaatataccacatattttttttccatttaaaataacatcatttggccattttattaatgtatttgctcctagattgtttaaagctttcgttacacttgctcctgctattaaagttataaatggagctttgaatggttccatatctggttttaatataatactcatccagattccttcatgagtttttgaatcccatcttcttcccaatcgtcctttccccatatcttgatgttcacttaaaatcacagtcccatctacactatttatagctatccttttagcatgttcatttgttgaatctatagtgtcaagatgttcaatattttttccaataaactctgtatctaatttatagtaaatattctgtgggcttaataaatcagttggattttccgctaatcgatacccttttttatttacagattctatattatatccctcttcttttaaggctttcatatgtttccatatagctgcacgtgacacccctaattgttttgataattcttctcctgaaataaattcagatttattatttaatataatctctattattttatctcgcatatttcacctctaatatgacataatttcatgacttattttcttctaataaataattatacattattaatatacttttaatactattaattttaaatttcctttttaattattataatggttgttttatattttatattgatgatttatataattttacattttatttaaataattttaaaataataaaaaactgaaagtatcaattaaattaatacatgcaaatataatttgcttattaatttaatattatactttcagttttagtatttaatccacatcagataataatcttaaaatgaccaaggtcttaaaactatttatctttatcagatttatcttctaaatttttatttatatcaataacattgtttctttcttcttcatctttttctaattttatagttaattgttcttcaacttctttagaagaattttcctctgtaactgcattttcaatttcattcagaggtaactctttattaaatgcttttacaaattgttctgcatctaaagtttcatatataagtaaagcttgtgctacatactctaatctatccatattttcttgtaatatacttcttgtcttatcatatgcaccatcaactatacgctttgtttcttggtctatctcaaaagcaacttcttcagagtaatttctcttacttgaaaaactattacctaggaatacttcatcatcactgtcaaatgacattggaccaagtttagaactcattccatactttgttaccatacttcttgcagtagctgtaactctttctaagtcatttgaagcacctgtagatacatccttaagtactagctcttctgctactctaccaccaagtaaaactacaatattttctttcatttcattttttgtagcatagaacttatcttcaacaggaagttgcattgtaaaccctccagctcttcctcttggaactattgtaacttgatgaacaggacttacttcttcaagtacatgggcacaaactgcatgccctccttcatggtatgctgtaagtcttctttctttctcacttattactttcgattttttagccacacctgctataacctttgttatagcttcttctatagtttccatcttaattttcttttctctttttctagctgttaatattgcagcctcattcattaagttctctatatcagcaggagtaaatcctggtgttcttctagccaagacatccatttttacatcatcacttaatggtttatttcttgagtgaactttaaatatagcctctctaccttttacatctggtgtaccaacaacaacttgtctgtcaaatcttcctggtctaagtaaagctgggtcaagtatatctggtctatttgtagctgccatgattattataccttgatttaccccaaatccatccatttcaactagaagttgattaagagtttgctctctttcatcatgacctccaccaagacctgcacctctttttctaccaactgcatcaatttcatctatgaatatgatagctggagcacttttcttagcctgttcaaataaatctcttactcttgaagcaccaaccccaacaaacatctcaacgaaatcagaaccacttatactgaaaaagggaactcctgcttctcctgcaactgctcttgatagatatgttttaccagttccaggaggtcctaccataagcattccttttggtattcttgcacccaattcaatatatttcttaggattctttaagaaatctactacctcctgcaaatcttctttttcctcatctagtccagctacatctttaaatgtaactctagttttttcatcatctttatgaaccttagcttttgatttgccaaaactcataacctttccgcctccaccttgagactgattcataaacacgaaccaaataatcaccatgaagaatattaacagtaatgtaggcaacatttcgacaaaccaaggtgtagatggcttagcttcaccaccaaaagttagtttcccagccttagcttggtctaacacctcatctgcaagtttatttcccatcacttctgttggaacatatgacttaaactttgtatttgtatcttttatagtaccttctacagaagtttgatttacaaagtataatcttgatatattctcatctgttaattctctatatacttcagagaattttaaatcttttattttttctgtaggcttacctgagaattgaactatacctactataattataaaaacaagtagataaaaacctgccccttttagcaacttattcaatatagaagccctcctttcatacattgctttgccctataatttgttaaaattaatttttaatacttcttttgtgttttcatcaattttataattttcactgattttataatctccaacacatattattccttcactatctgtgattataggaattttacatctttcttctcttgggatttttaaatctatgaataaatctttcacttttttacttcccatagcaagctttatcttatcaccttgccttctgcttcttattactatacccccttttaccttattaaaatcaaaccctttagatgaattgtctaatttcatactcttatacctatctatgctcattacttgggtctcaataatttgttttaattcttttattttaataaacccattactaggtacattgtaataaaattcaatttcctcattaacaatttcctcattcgttaatattatactgtctttttttctataaacaaatatatttcttggaagagttaacattttatttacttttgaattatcttctaaagacattatatcttctatatgtctttggtcaacaaaattagtatctcctagtatatgttttatggaatttctaagaactctaactttgatagcatcatgtaagcaaacaaaatcgtctaaatttatctctacaaagcctttttcttttatatttgaaacttctctaaatttagcttctgcctctttctcaatataatcgttatcactttttaaactattgctcatcctcactatagattctattacatttgaattaaaattatccttcatatatggtaaaaggtctaaccttatcttatttctagtgtatatattttctaaatttgttttatctatcctcggatttaaattataagcttcacaatactcctctatctcatttctttccacgtctaatatgggtctaattatgcaattatctctaatataatcaattccctttaagccttttaagcctgttcctctcatgatacgcatcataacagtttcggcttggtcattgagattatgacctattgctattttattggctttaatcttatccttaatttcataaaacatttcatatcttagcttccttgctccttcttctaatgataatccctcattttcacaatattttggtacattaatagactttacaaagaatataattcccatatcctcacaaagtttagatacatataatgcatctttttgagcttctatccctcttatttgatggtttaaatgtgctgcatatatttctatattaaaatctttttttaatctatttagtacatgcaataaacaaactgaatcaggtcctccagaaagacctaaaactattttatcgcctttttgtattaaattatgtttatttatagtacttagtaccttatcaaatatcatatttatccctcttacacttagttttattcacttttaagtatactttctataaaaaaacgctaaacccttgtatcaattttaagaaattaaagtttaatataaatataataataccaaataaattaaataaaaggtagttttttcactacctttataaaatttctggaaaatagccatagttattatttagtacctatgtatatatctattttattcctacctaaaaataaatcttgtacctttatattatagtctattttcaattttatgtgttccccttcttgtatatttatatctaattctcttgtatcaatatcaattaataaagtaccttgtggggtcacatactttgtagtactactttctccacatttaaacagcattgttgagttaatagcaccaaactttttgatactaacttgatttttaagtatctttatagtattagttatttctatattttcttctttttccttgtaaataacatatattccatcatttttataaaaaattttaccaaaggcagtcatctctatggtgtccatatttcctttttcatcatattgtctagtatttatacttatttttacactcaacgatttttcctccatagattcttcatataaactagtatttttgtatttctactttttgaatcttatcaatttttttctttaagaactctcttgctatatctgaaaatttttcaggtatatctgatacataatattgataagtcccatgaatttctgtattgtttataatattttgcacctctaaaatcttttttaaatcctttgcagtctctttagctggattaacaagttttatatgctctccaacttcttcacctattgttctctttaaaataggataatgagtacatcctaacactaaagaatctatatttttttctttcaattcttgtaaatatatctttgctgtcaatttagccacttctgtatttgcccatccttcttcaacaataggtacaaataaaggacatgctttattaacaatttctatactctcatctattttagatatttccaagttgtatgcttttgaacttatagttccttcagttcctattattcctacaattttgttttttgtagaacttacagctgttctagctcctgcttctataactccaattatcggtatatcatatttttcttgagcttcttttaagcttcttgcagtagcagtgttacatgctataactatagcttttacaccttttgtttttaaaaagtttatagcttgaaaagtatatttaattatagtttctttggatcttgaaccatatggtattctggcagtatctccaaagtatattatatcctcatttggtaatatcttcattatctcttttagaactgttaatccacctaatcccgaatcaaaaactcctattggtttattgttcatctttatacaacacctactttacatttttgtgtttaacaacaacttatttatcgctaaaatttatatttatattcataattaatatattattacctaaatgattattatagtttattttacacaaaaaataaaggagctatcttaaattagaaaataatttctacaaaaagacaactcctttcactacttaaaaatttaaatttattttgcaaacacatgatttcctattctcatataaggattcaatctatttatccatttgcaagtggctatttctggattccaaaaatatactgctttattagttgggtcagttccataaagagcttcctgagctgctttacgtgctgagtctgttggtgccatctttattgaaccatcaagcacaactgagaaagcatttttttgatatatgacttcttctattgtgtctggaaatctagggtccaatactctatttattactacagctgctacagcaacctgtccctcatagctttctcctctagcttctcctgcaaccaacttagataataacatcaagtcattatcagataaatttattacttctttctttgctatatttttttcttgtttgtttactttcttaatattttctgttggttcatatgcaaatacctctttaataggcataaatataaaagtcaaagctaatagtgtagccatcagtttactccacctgtccatgattaaaaccactccttacattcttatttttaaaattttttctctaaatccttgactacttcaagtactttaaacttaatttttactctacttgttttttttggtgtatcttgttttattaacttatattctttatcagttaaaacttccttcaacttatcatctgtagatttatctatcactccattagattcatcaacaaaacatagtggagggaacataacacaccaccagttttttccttcacctttcccaatgataatctttaatgctttatattcaccagctggaagaactatattagaatattgtttagtagggaaattgctatattgtatacctacctttacactgtaattatatccatttttaagaataatatttttacttatttcttccagactactatattccttttttataatagcttcactttcttttatactttttgaattttgaagctttggctgtaaatattttattacttcatctctaacttttagtttaagttcttgatcttcatctgtattgctgtttgctataacatgaaatcttattaatttatctttataatcttttgatatattgtctactttttttacctcaccatttattactattgtcattattgatatgactgatataagacttaatattaatagtcccaatctaatcttaatttttctcattgaaaattccccctcaagataaatttatatcatcaattatgtccaattaaatttaatttattcataatattttttaatactaataaaaaaagctatcttaaaatgattacaatcattttaaaatagctttttaaaccttatattttataagtctttactaatcatagccttatctatcataaactgctctgctttttctatatgctctgtagcatacttcttggatagctcactatcacctttaattatagcatcaagtaagtatttatgctcttcaacaatattatgtgatgtatcataagcagacatataggtaactctaaatctatatacttgttcccataatgagtttattagttggattaattttttattattagttgctttaaatatacattcatgaaattctacatcaagttttaataacgcatctacatcggattccaaagtgctttttttaaattcttctgatatatctttaagctttttaatatcttcatcactaattctttcagcggcaagatatgctgctaagccttctaggcttgctcttacttctaatacatccataatatcctttaatgacatatttgccacatacgcaccttttctaggcaacataacgactaaaccttctaattcaagctttcttattgcctctctcactggagtcctacttactcctaattgttctgctagttgcacttccattagcctttgaccaggctttaattttccttctaagattgcttctcttaaattctcaaagactacatctcttaatggcttgtaattatccaagttcagtttagttaaattctccacaaatttcaacccctttttgactgctattaacaacatacacctgtttatatttttttaataattctttttttccaattagagcatcttctttatttttaaatagtccaaaaactgtaggaccacttccactcatcatagaacctaaagcattatttttcatcattacttgttttatatcacttatttctttgtgtttacctatagtaacattttcaagaatatttaccatgctttctgatacagcttttatatcttcagattttaaacactctatcaaatatttattatttggtctttttttaatattattcaaatctaatccttgataaacttctttagtagaaacgaataagtctggtttgcatatcaatatatttgtatcacatggtaaacctttgatgtttgttagcttttctccaataccttgagctaaggcaggtcttcctgatatacaaaaaggaacatctgcgcccaaattaagtcctatttcttttaattcatcttcagataatctaagttcccataggtgatttaaacctactaatactgcggctgcattagaacttcctccagccatccctgctgctacaggaatatttttttctatgaatatttctacacctttttttatataaaatttatttttaagtattttggcagctttataaacaatattatcttcatctaaaggaatatctaaactagtgctttttacctttatttcatcttcgtctaattcttttatctttactatatcgtataaatctatcgtttgcattatcatttcaacaaaatgataaccgtcttgcctttttcccaagacatcaatggataaatttatttttgctctactctttagtcttataaaatccattctatcctccttgtttaaagaataatgcatcactaacaataatattatactacaaaaaataaaataatagggtattataataccctattatacttaattactttaaattttttaatattaatctactaatacgacttttttttctaaaataagacacttaccaggcttaattggttcatcaagttttatatcattaagttctgcaatttcattttctgttgtattgtatttttttgctatattccagaaagtatctccttctttgcatatatatacgattatgctaggagctttagataaatcatatacaccttggtcttctcctttgataataaaattttctgctttcttatctaatgcttcagtaaatctcttaattttgataatcaagtctatctggtccctattcaaatcaacttcgactttatcaatacatgctgtattaaacacagatgctgtatcagttagattatccatttctatatcatgttcaaatggaatttcctcactaattttataaaccaattttaaaccttcaactgggacaaataaaatttcaacttttatgattccttgtataatgcttttatttccttcaatataactattttctatagacatggttggacaaacgcttacaatatcttttatttgtatatcatcattatcatttcttatgccttctctaaccataaatgtttcttcactacgtcttaaagtcttatttaattgaataggtttgtggtcaaattttattatcttttgaggcgaatatgcatcttgtaatacttctcttgtaacttcatctgtaacttttaccttacaacaagccatacaatctatttctaaaagacctgtgttgctttcactattttgcttgaaaatatgattaaaatctgacatagacaacaatacttcttcagtcataccatcactaactccagggacttctacaaattgagtaaactcaatacctactctatccaactctacaagttcaccctcatatgtacaagctaacggatttatttctaatactccaccaataataactttattgtcagtcactctactttcttttactttaacacatggatttaaacttattatagattgaatttcctctgtgtttattgttatagtatctcttatagaactttctgctttttctattccaactatatcttgaaaacaaatttcctttctgtgcttttgtatgccttccacttgcgccacatcttttacaatgtctaacctttgcttttcaaacaaacttccccttatattcataagagctcctactttaatctttctctcattcattatagtacaatccatatgctctacttctgaaaataacatgtattccatatcttgaacaacattgtctttttctattacttcgtttatatctacttttccgtctacattagaaatagtatttttatcatctgcaatatagattacattataattaaaactacctctgcaaagtatcttcccatctgccatttcaatttttttaagtgatatgtatccttctgtttttacaatttcatatacatctaattttttgtctggtacaactgcctccgcttcaatgaatgtttgaaattttccaaagtctattctattgtcaactttaattacatctttaattaattccatagtctacctccttaagtattataaaaatatcacactatatttatatttaaggagcaaaaaaaaaattacacctatttttaaataggtataattttaacttatttgtaatttatcttgatctctaaaaacttgcaactttacattagatgttaataaatctgagtaactataagatactctaggatatccattactttcatcatctaactttataacaaacacgcttggataaactttttctagtataccctcttttgtaataatctgctttcttcctttattagctttcaacaatattttctttcctatatgtctctctaagcttactcttatcttatctagagtttgaacagtagccacaatatcaccttctttaacgtttatatgtttacataatatcacatataaacatttttgtcaaatgtttaaactaattattttatatattttttgcaaaaatgtcaatactatttttgaagatatacagtataattatgttaatttttgctaatgtaatattgtttttggcattgcccatctaaattttcctcttgtttcagaaccaccaattcccttaacacctgtaatagtctgctctataacctcatcaataggaactactacatcaattcttgaacaagcaattttctccactataaaaacagggtctaatgcatgtatcattattcttccaggcgaacttgcataatttgctcctgcacttattattttttcataatttgattggcatgctcctgcgaatatgacaagattatccaaatttggttgccatttacgtgcttcttttactgttttaacaaaatttgaagagtttctatagttactcatatcttctatatctcctctttttattgtcattgcatcatgacctgttattactagtatatccggattatatttttctagtagtgctcttacttctttatactgattttgctctgaaacagctacacctactgcaggtattccaagttgagcatatacatccaagcaaatttttaaatattctttatctccatctatctgtagtacttttccaggcattccatatgtgttaggatttaattgaagttttggaactgctctagtcattcttttttgtctttctttagcttttcttactgacttatataataaattttctacatttttatctattaatatatcttttatatcaggtgcttttactaattctaggtcatcaatataagcatctgctattactctaaatgcaattccctttagtatagctattttctcattattttcatctacaccaaaagagactattttaaatactatatctttgttatgtgactttctagctacaatgtctcctaccttcatagttaaacctccaataaatttttatcttagtttatactatgttcgatataaaactttgtttcctaatgtcaaaaaaacatttcttataatacttcttttatcactcttaaagcatttttatagtatatcttttctatatcatcttcactaaacccttctttttttagaggttcatacagtttacccatctgagatatatcttcaatctcaacttttgaatctattccatcaaaatctgaccctagggatacaacatctattcctccaacatttacaatatgttttatgtgtctaaccatatcttcaagtttactttcacttttatcacttaaaaataagtggaagaagtttatacctgtaactccacctttatttgctaatactttaatcatatcatcagttaaatttctagaatgattcatcattgctcttgaattagaatgtgtagcaattattggtttagaagaaatctttgcaatttcataaaatccaccatctgaaatatgagaaacatcaaccaacattcccaattcattcatcttatgtaccacttctcttccaaaatcagtaagccctttttctctatattctactttattatgaggaaagctcaattcattcacatgattccaacttattgtcatcattctaacccctaagtcgtaaaatttctttaaattttctaatttaccttcaagtactgcaccttcttcaatagataaaagagctgtaagtttaccttctgattggtttttcataatttcttcatagttagtagctaaagctatttcatcactattttttttcatttcctcatgaaatttatttgccatactcatgcaataatcaaaaggatgttttacttcttcagtatcaacaaaaagagcaaatgtttgagctaatgaatccccctttttcaatctgtctatatcaacagaatatttattagacttaagttcacttgtttctacattttccattaattttgctatagtatcacaatgtaaatcaataaatttcatatttataccccctgtatattttatatttatatctaaaaatagaaatagttgtccttatagacaactattgacaactattttttaatattctttttaatattacttaatcttattcttcttttaagttaggtattacttttttaacttcttcaatttgatgccatgttttatctatattattttcactaatatatttttttaaatcagttaaagatgtaaaatctttaactgataaattgtcatcatcatctgcaaatcttaaaataaacatgagactcccttactttccacaacatttcttatatttttttccgcttccacatgggcatgaatcatttcttcctatttttgcttctttaactattgttttagacttcttataagcctttattatttcttttctttggtctgctggtagtatatcttcccaaccttgtaaattatatagccaatgagcctcaacagttaccatattgttatataatttttcccaatctatttttatagaaacttctttatcagcttctacttcttctaaaactatatcttcttttaagctttcacttattccatctatgaatcccatgaaaaattcattagtagttccaaatttttcagccaattcacttactttaccttcaacaacatccattttattatttaatatttcattgtatattccagcttcaactttcaaatattcttcccagaattttacttctgcttcttgactttcatgattatcacttaaatttctccattcagtatataaactcatactttttcctcctaagtatacctatatttttatagtttttatagtataaaatcttttagttagattggaagtttcttctttttgattataccatattctatttaaagttaactcttatattatatcataattaaacaattcttttaatacttttatagcatactcttggtttataaaataagggcttgtcgcaattgttattactttggcttttttaattaagttttttatcttgtaaaatttgagttcaaatggtatatagtccatatcacttgaaaatatatccaaatctatatcaagaacaaactctgattctacttctaaatcaaatccatacagactatctattattattaattctgaaaatatgttatattttaaagcaggttttataaaacttcccacatttaaaacttcatttgtatacctaaatacatcttttagattatttacatctacatcatagttctcaggctctctagtatccttatgttggtctacatgcactaacttgcatccttttgtaaattcaccctttaacaaagattttgcccaaaaataaaatgcatggttatgattgtcaaacacatatatctttttatttcccaggacatattcgaccatattctccaatccttttgcttttatttccttattttcatctacttcattaaataccacctcattgcctaaccttacatcatttaatgtaccatttataagttttggaacgtatatgctcttattttctcttttatcatatgaaaatacattatttcctactggtttttctatataaaatccactatattcataattttccataaaactttatttcctccattgttatataaatatataagttataattttaaaaattaaaatgcacttattgtaaatcatattatctattatagaaaacatcttatataactaaatataatatcttctctcaatatgtattatacaataagtgcaaaatatatttatataaaatatactacattcctataacaaaaccatcagcttcaattggaaggtaactaactcttctattcaactccacctttccaaaaaatactacccaatatggtctaaaaatactttcaattttaactatttcaatctctgggattcctcccataaacctatgaattaatctcatagccattttatttgcctttgcttttactcttcgttcgtccttattactatactgcacaatattacaatccacattttttacaatttcatatgtaggaaaatcttgtactatactaccagaacctgtagaaccattcactaaaatttttaattcatttatatcattagaatatctcctattcttgaaaatggatttcgttttgtgaattttaagtgtgataattttaaactctatataatgaagtctaacttcatgagcatatttgttctttaatattagcttactaaataaagaatttttcccacttttagctatctctatagcttcttcttttgtaattcttataggtaacgctcttatatccataaaatcattctctttcttatttttttcttgtcatttttaaaactctatatatataatcaaaaaatattacaattacaactgccataactccatatggaattatttttccaactataatatcatttctagtcaatataccataaaatataaatcctgttattaaaaagtacaataatactagaaaaccgtctactccaagccattttatttctaaatctttttttaccttagacactaatttagacatagcagtttctccttttatagattattttgtgtatttaaattttcacctattctattaccaatcatccatgcaataaatgaaaaaggtatagctatcacaagaggctctaactcaaagctctgaactggaaatattttaaaataaccaaaagtcactccacctacaatcattcctaaaataccacccatagatgttcttcttccatttccaagaagcccacctactataggtacaaatgccgaacccatccaaatacttcctacaaatatacatgcatcatatacattttcaaatctaaatgctacgctaagccccataactgctgctaaacatacacctattctagtaaactttactaattgtttctgagataactctttttttgtaattcttccatatatatcatttgctaatgtagctccagctgctagataatagctatccaatgttgatattatagaacctaaaattcctattataaatattactcttattccttgtggtaatgtatctaaaactaaagttatatatccagcggctggagccatctctggataagtagctcttactataagtcctgttatagttaacaccatgtcaaaacatatccatagtgaaaaacaagttaataaggctcttcttccaaccttaggagaatctgctgctgaaaatctttgataaaaagttgggtctgaataagctccaaaagaatatacaattaacatcaatgctttcatagctgacataccttttgtagggtgcataagctgtggtgcatctttgagtgcttctgtgagaccttgaaatcctcctatttgttcaaattgacctggcataaccatagttaaaccaaataccatacaaaaaaacaataccatatctgtaatggcaactcccataagcccaccaagtactgtaagtacaacgactactcctaccattattaatcctattaattctttatctattttccatgctacgttacctatagttcccatagcagttatttctccaagttgtgcacaatatataaacatcaaaattgccccaattatagcaacatgcttaccataaaaactttccagtaaatcaggaactgttatattggttcttatatgaatccttggaccaacccacaatgctaaaggcattctcccaatatgtgcagctattgaccaaactgcccatgcagatattccatatatagccgcatactctacactacctactgtaccaactcctccataccatgatgcaaccaaagttcctactattaaggaccatggtaaacttcgatttcctaggtaataactttccatatcttttacatttctagaaaaataataacctattcctaataatataaatgcaaatataactataatcccattttcccaaaatgttaacatatctaatctccacattcttatattttaatttttaactttaatatctaaatatgaacaactctacccatttccataaaaataggtagagttatataataattataagtatttaagtaatcttgttattaagcaattttattgtttaaacctttattttctcttttatttattttatttaaagcataagtagcaaatatccctataactgcacatactacagataaaataaatatatatgtatatcctgtttgtccatatttatctaaccaattacctgcaatagtgtaataaaacgcatctggagaaaatcctataaatgaagcaaatccaactactgctcctgtagtttctaaagatatattagactctgaaacagatgcaaagtatatacctctaaatccaaataaaattacacttagtattatcatgtttattacagctatccatataaatcctgtactcttaggaataaccaagtaagcagctgtacttactgtcattaatataaatcctacaaacattactcttatagatgaaccaactttatctgttataacaccagcaactggagatgctcccatttttataacataagttcttattattgataaagcagaaactagagtcattggcattacataaacttctgataagtatggacttaaataagttaaacttgagaatactaaataagttgaaaatattataagaccaattaaccaagcctttggcattgtaactacttttaacaatgacttaatacttaatccttcatctgatgctccactatcttttttctcttccactaagaaaaatagaagtataccacatattatagatgctgcagaatataaccatactacatatttgaatcctactgttatttcagcaaatttaccaaagaagtaaagacctataaaagaaattaacgtacctgatacacctgataacccttcataaaaaccaaatattcttccttgttctgactcacttccttgcattctaacaaccttaacagatgctgagaagaaagttaatattgttgtaaatccccataatacaaatattaagagtatcatactatatgatgggaatgtagagaaataaaaaccaagtactcctgaagcaattaaagaaaaagttatcagctttctaaccgagaatctatctgcaaaccatcctcctataaaataagataccattcctactaatccatataaactcaataagttccctatttgtgtatggctcaatgataaagcttgttgcattgggtcataaaatgatgatttcatatatggtaaactatacatagccgttgttccaaatgccaatatgaatattatcaagaatcttttaaaattacttttgttctccattaattttctctccttaaaattttattgtttataatctcattcatgtaattttattttaatttttttattgcttgtttaaagtcatttattatatcatttgaagattctaatcctacagctattcttattagattttctccattcatttgaactaatgtatgctcttcccctaagcttgttgctattgttgcaagctctaaagagttcattaattttctactagcttggtctcttgtcaatccattgataccatccttaagtttaaatgaaactacacctccacctaaaccattcatttgagttttacaaagctcatattgaggatgagattttaatgctggatactttaccaattccacattctcttcttcctctaaaaactctgctactgctaatccattttcacaatgctttttcatcctcatatctaacgttttcatacctcttaaaatcatccatgcactcattggtggtaaagatgctcctgtaaaacaacataaacttggccatctaactaaatctattaattcttttgaacctgctactgctccccctaaagtatccccatgtccatttataaacttagtaagactatgtattactaaatctgcacctaaatctattggtctttgtacaattggtgtcccaaaagtactatcaactatagctaagcttttattttcatgagcaatttctgctattgtttttatatctactaagtctaatgatggatttaaaggactttctatataaactattttagtatttggtctcattgcttcttttacattttgtggatttactgcatctacaaatgtaacttcaactccaaatttagataacaactcagacatgaataatttagtgtgtgaaaatattccatctgaactaactatatggtcaccactttttaccaatgctaatatagtagatgttattgcccccatccctgatgtactagatatggcactttctgcattttcaagcatagccaacttagcttctaactctgtaagagtaggattacactctcttgtatacacatatccccatgtcatacacaactcttcaaaatgctctactgtctttgcagcaaatgttgctgtttgacatattggtgtagccaatgcacctgttgttgggtctgcactatgtccccaatgtattatttttgtctctaaatcttgattaatattgttactcattttgatttcctcccattttgacttatttatacaacgttttccctgccaaatttaatcaatttagcttagtcttaatacattttttcaagtatacttttttatttgttataatttctaaaaatatgacacttattttgtttttttacagttctaattataaactctatagtaactatagagtcaatatgtttttgatattttttttacaatgtttaaaatagtcagtacaaaaataggtatatcttagaataactaaagtcatcctaagatatacctatttttatatcacaatataaataattacatataagcattagtttttttatcataaatagatttttcaagatttatcatcttttcataaatatattatagttaaatattttaatattacctaacatctacaataaaatatactcttaaaataaaattatataattaaaaatactctataaaagctaaaaagttttctattcgctacatctaaaaataattagatagaggtataaatgtatttagtttatttatacctctagtcttttataaattatatctctactaaattgattttttagcacgaataagtgtgctcttggagataccagtcatcttcacaacctctctatatggcttagaatttaataaccccaatgcatattgtatctgttgattgctgtatttctttggcctaccatctttaaagtcctttttctttttagcaaattcttttcctaattgagtacgttctattatcatatttctctcaagctctgcaactgcaagtaatgtagtcaaaaagaatttacccattgaagtattttctaaaagacctatatttaaaatatgaacacttacttctttagcaaataaaccttctattagttgtatcccttctgatgtacttctagctagtctatccagcttagttgcaacaagtaagtctcccttttttagagatgatataattttttcaaatttaggcctgtttgtagtagtgcctgtataagtttcctttattattttagcatcattatatttattcaaaatttcttgctgttgctgatacaaactgttgttgtctgtttgattttttgtacttacacggcaatatccatatataataatcatcacttcctaacataaagattttgtacagaagttacccagaagcttgtttttacttatctttatccattttactaaaacgatttttgggtgtcaatactgttaacttttgacaccataataattcctttataatttgtttgactatgtcaaaaattaccaatataatgaaattaatgagtttatacaaattggaggaaataatatgaatagtctgttaaaagaagcaatagatgaattaaaaaacatccattgcggggaagtttttttattaaaagaattgttcaaaggctatgaatggaacaggttggagatgaatattagattgaaattaggaaaactttttttgtatgaagtggtaactaatcccaatttaaatgtagaggtcatcaataaaaattctgcttatcagcaaatgtataaaaaaaaatagtgacttaaatgtatataatagtataatcttcttattgattcaaaagttaaaacttttaatacaaaacaatcattctattttaacatttatcaatatgtctaaatttatataattaacacatacgaatagtattgtttaaatcacattatttaagatagataaatcttaaccctactccagcataaatactaaaatagggcttagaattatctatatttttatcccataaaatgcttagctcttcctcttgattgaacatatatatctggggaaatacaatagaagcgtaaatttataaaatttccaaagtcagaaaacttcagttcaaacttaggtataccaaaactttcaggtgctatttcatcaacgccaaaatagatgataattccattatctgtaatataaaatgcttggtcttcaggtataactaactcaacattagaataatacatttctctattttcatttatttgagatttaatgtaatcagtaattatattaatataatcaactccatctctaaaaatgtcattaagtaaaagttcttttccagttgtcaaatctatattgtaattattcaatgtattgtatttaggcccatagttattagcaaaccccataaggtttaatatcatactcagtacataatttttattaaaagtaactgcgtaactggtagatacccaatagctttgttttggaagtgaattttgagaagctgcgttattatattctcgttcttcttcctgtaagccatttttaaaattatttacagtcattcttacagcattgtttatgttatttaaaataactgggtttacatacgtggattgatttctaatattgtatataacaggatactttacatcatatgaaaaatacttacttctttcaaaatcttcattaaattgtacatataatatattatatgtacaggtatttgtagattgataattttccattaaaatcctcccccttttataaaaaaatcagatacaatataatatgcttaaaacagtaataatgttaatagtaaatgtaaagaatagaaagtatctaaaacagcaaaaaatgactaattttgtggtataatacataggattgagagttattttataggaggaaaaatatgttattattagcagataaatggaaagattatgaacttatagatatgggaaatggagaaaaattagaacgttggggaagttatgtacttagaagaccagacccacaggttgtatggccaatggaatctgaatgggctttatggaaaaaccctcatggacattatcacagaagcaataaaggtggaggtcaatgggaacacaaaaaaagatatccagaacaatggactataaattataaaaacttaaagtttcacattaaaccaactggctttaaacatactggattattcccagagcaagcagctaactgggattggatgatagagaaaataaagaaagctaacagacctataaaagtgttgaatctttttgcatatacaggtggagctactgtagcatgtgcatctgctggtgcagaagtatgtcatgttgatgctgcaaaaggtatggttaattgggcaaaagaaaatatagaattatcaggtcttaaaaatcaaacagtaagatttatagtggatgatgttgtaaagtttgttgaaagagaaataagaagaggtaaaaaatatgatgcaataataatggaccctccttcttatggaagaggtcctaaaggagaagtatggcaaatagaagaaaagttatacagttttgtagatttatgtatgggagttttatcagataaccctttatttttcttaattaattcttatacaacaggattttctccaatagttcttgaaaatgtattgtctacaacaataggtaaaaagacaaatacaggagatatatacggtggggaattaggaataccagcttccagagatggtaagatacttccttgtggtatatttggaagatgggagaaaaaataatgataaaagtcatatatgaagataaccatttattagttgtagaaaaaccagttaacatattgtctcaaggagataatactaatgataaagatatggtaaatcttttaaaagactatattaaaaaaaagtataacaaacctggaaatgtatatattggtttaatacatagattggatagaccagtaggtggagttatggtgtttgcaaaaacatcaaaagcagcatctagattgtctgagcaggtaagaagtaagactttcaaaaaaacttatctagctgttgttcatggcaagataaaatctaactcagatatactaaaagattttttatataaaaataaaaaaactaatatggtaactgtagtgaaaaaaagccataaagatgccaaagaagctgaacttaactataatgtattagattttaaagaaaatctaagtttagttcaagttaatttaaagactggtcgttctcatcaaataagagttcaatttgcaagcagaaaacatccattatacggagaccaaagatatggcaaagaaataaataagattggacaacaaatatctctttggtccaataagatagaaatttgccatcctactacaaaagaaaaaatggaatttacatgtcatccacctgacaaatatccatggaatatattttaaatctcaaatgaggtgattatatgagtaaaaaattttcaataggagaaatgtctaaacttcataaaataagcatacagacactaaggtactatgaccaaatagatttatttaaacctgttcatgttgaccaagaaagcaattacagatattactcaattgaccaattttcacaattagatattataaaatatttaaaatatttaggtatgcctttaaaagaaattaagtcaaagcttgatgaaaataatgaagaaattctaaaattactaacaaataaaattaatatagtggatgaaaaaattaaagaattagagcttataaagaaggtactaagcacaaagaaagaaactatggaaaaaggtatgaaagtagatgaagttggtaaaatagtgagaaaacatattccacgaagaagtatcttatctatagagtatgaagaaggattaagtagtgaagaaactatggaactttccagaagacaaatagcaaatatattagaagataatatatctgtgttctatggtggagtaagtggacttgtatctatagataaatttttaaaagaagataaagttatttatgacaatagttttgttactgttgaaagagacttatttgatataaaatcacaaaaacatataacagaaatttcatctggtgattttatttgtatgacatataaagggtcttacaaagaaaattataccgcttttaagaaactggttgattatgttgaatataaaagaatacctattgaaaattatatatatgaaatacctataatagaccctctgtctacaaacaacgaagaggaacttctaacagaaattcaaatacaagttaaaaagagagaaattgacttaagatgtctagtgtagtaatctagtttacttacacatcttaatatagttgtctattatcaacatatgatttttctagatagtgattcctaacagtgagattttcaaaaaataggaggaaatatggctaatgctaattccctcctatttttaattaatccatatcattttaattaagccatgtcatcacgaagtgcatcaataatattttctttttttatcttattaatagtatacaacattgtaataaatactataaataaaacactaaatatactaattccaatactaaaccatggaatcacaaaatcaatatcatctgtaaccattactttatgaattagccatgaagaaattactgctataggaagtccaaagaacaatgctctcatgccataaaaagcacactcaaaattcatcatcttttggaaatcatgctcagacattcctacagagcgaagcatggcaagttctctacgacgtaacttaatattagttgaaattgtattaaacacattggcaatcgaaatcagagaaatcataattatgaaagtataggcaaaaacattggcaataaaaatgtaattacggttctcatccatcattccatacatattgtacagattgtactcattagtaactccctcactctcaataatttgctccatttctgcaactgactgagtaggatttttcgattgaaagcttaaactttcaattcctgtagaaacaccaggaatctcaaacttatctttggctgaataaggagccaatactctgaagcttgctttcttcacatctgaacttctgattcctggaggagaatcaggtggcactactttgacaaatgaaatattcacattttgtctctcaggtatctccaacttgccattagtttcaggagtgagactaacattcatagaagaactgttgaaaatatcaataatattattatcctttgttaccatagaaacagcaatcagttttgcattttgtccagtatattcttctgctggtaatccaagacttttaataatattcagataagttctatcatcaagaaattgcatatctactggtaattcaagcatttcactcatagaatgtgaaccctcatagttcaaataatcgtctgtaagctcacttactttggcaacacatgaataggtcataagtttctgatacaaaccttcgtaaacaccatttgcagtttttagcttatcgtaaagcttcaacatttcgttgtctttcataccttgtgtagaaaaaataatatcctgatcagtaacctctgacctctgatttgacatctgttttaggtctgctactaaagcacttgtagatataaataaaactatgcttaaaacaagcgacaatacaatacttcgataacgtttcttgtttcttttaaagtttttcatagcaagaactccctcaagaccataaactcgctgtgttagttttgatgtcttcacagatttagattcaatttttacctcatttgtctgacgaatacactccatcactggtgtgttggcagcctttcttgctggtatgtaagcagaaattaagattgtaaccatacttaccactgctgcaacgatgattgcagggatagacaatgttaatgtcaacggaacgtttacatagagaatatttgcaaagtttttagctatgacagaaatcacaagtccaatactgactataccgattgcaacaccaattggtataccaatcgcaccaatgcaaattccttcaaatagcaccgaatttcgtaactgttttgctgtagctccaacagatgaaagtattccaaattgatgtgttcgctcgttcaatgacatgttaaatgaattatatattagaaaaattgagcctagcatgattatggcaagcacaatgccaccaaccgagtacaaaaacatattgaacaaattgttatcagaaacacctatgaagcgcaacacattgtcattgaaaatggaagcatggtctttagtgctacttgtgtaagagcgaatctgatgtggatttttcaatgtgacaaaaaggctaagactgtcagtcttgacttgtttatcttctttggttatcaaggtatatcctggtgcagaagattcttcaaatacgggctttctacagatacccacaactgtataagttttcttatcctgtggcacaaaaacttcactcccagcagtgtaggggtcactctgaccaagcttttcattttcactcattcgtttccctacatccaaagaaatagtatcacctactgcaaatttgacaccaccatctgtcgcaactttacttgaaacaagaatctctctactattttcaggtaatcttccagaaattaaagttataggcaaagtatcaaaagcttctttgctaaatccagcaataaaaagatatggtttatctggatttctgttaccttcaagtgttgcatagccaatattttcaaatgttgcagtatttgcaacttcatcattgactctttgttcctgtacaaaagaagaatccacatccaaaaactggacatgccaatcaccatattttataatagctccatttgtcatatagttcatcaaagaaactccaaaggtagtaactgctgtaatcatagcagctgacagaacaactcctataattgttacaagagttcgagtgcgattctttttcaatccttgcagagcaactttgttaaaaatgttcattaacgattcaccttcctctcatcacgcaccacttttccatctgaaatacagataattctatctgcctgtaaagcaatgttttcatcatgtgtgacaataatgagagtttggtgatatttactatggctctctttcagtaactggataatctcttgtccatttttactgtctaagctacctgtaggctcatcagcaagcataactgctggtgcattcatcaatgcacgaccaatggcaacacgttgctgttggcccccagaaagttgatttggtaaatgtgtttttcgttcttttaaaccaagtaattctaacaagtcatttaaccgttcttgattgaccttacgcttatccataagtataggcaatgtgatattttccactacatttaatgtgggtatcagattgtgaaactgataaatcaatccaacttgtcgcctacgaaaaatagcaagtttttcattgctttggccatatacatcttgcccctccagatatatctttccacttgttggtacgtctactcctgcaatggaatgtagtagtgtagatttaccagaaccagaagaaccaatgattgcagtaaactcccctttttcaatagtaagtgagacatggtcaagtgcagtaaccttattttcattcttaccataaaccttacataaatcttcaatctttaaaaacgccattatataagtctcctttcatattttataaatatatcatagaactttcaacttacatttaagtgacatttaaatgagagattcgtcactttggaaaacgaataacaaatattgcaccaccttgtgggtgattttgtgcagtaattgttcctccttgtctcataataatcgtcttacaaagtgccaatcctattccataaccagctgtgcttgaatttttcccacgataaaatctgttaaatagacatggtaagtcttcttttttaaagcctgctccgttgtcatgaatagtaagttgagtaaacaaaaagttgtcctcacaaacgatatcaatttttccattatcacccacactctccatgcagtttttaaatatattttgaattgcttctgaaagccaatttaaatcacccaaaatccttactccttttggtatatcaatatgtaaagtgatattgtgcagttccatgggaatcaaaagttgatgaagtgcagaactaatcaaattattcacatcaatttgttctttttgaaagactacaatacctgcatctaaacgtgataattttaaaagggaagtaatcagccagtccattcgtataagtaattcctctgtttctcgtatcaactcttttctctcatcttcatcagaagtattctctaacagtgacaaaataagagttactgatgtaagaggagtgcgaagctggtgggctatgtcagctagtgagtcagcaaggtgttctttttcttttttcagtgcgtaattttgctctctaatacgtaacgtcattttagttatttcactttgtagaatagaaagctcaccctcatctgattcagcaatatacagatggttagcattatgaagcacaagattaatttgttctgaaatctgtgcaatacttttgtatcgatttttagtaaacacaaaaaatgctattccaaaggtagtggcagaaacaatagaaagtattccagtcataatactgattgcaaatcccagggctacagtgagaatagtaattaataagaataaaatagcaaattttcgaaactctctatttcgaaacataacttccccccaatctataccctgtcccacgaacagtcaaaattatttgtggacttgaagggtcatcttctatcttctctcgcaagcgtttgatgtacacagtcaatgtgttgtcattaacaaactcacctgccgcatcccacaattcatcaagtaatcttaccctcgtaataatacttttaggattgctaataaacaccaataacaaacggtattctaaagctgaaagaaaaacctcattgccattctttttcacaacaccggttgccgtatctacataaagcccacaaatttcaaaagttgacccaaaacgcccactttttcgtagtgctgttctaattcgcgcaatcagttcacgtggacgaaaaggtttagtaatatagtcatctgcacccatattcagtccagtaacaacacttgattcatcaccagaagccgtcaaaaagataacaggaatgtcttgcttttctttgatttctgtgcaaatcgtaaacccatttccatcaggtaaagaaatatcaataagtgccaaatcaaatttattcttagcaatctctacaagtgcttcacttcttgtggatacatgggttactataaatccttctgaattaagcaaaagaataagatttttggcaattgctttatcatcctcaactaaaaatatccgtttcatttactttcatcctcctttattttattagttttatatattccagcagagcaatagtacactactattttacttatcattacacaattttcagtagtttcttttgttcttatataatccatgcataatacctccattgatttattatatttcttataacataaatacacaagataagacaaaaaacataatgtaagtgcaagttttttaactcactaacttataaacatacactcctactaacactactttcttgatgacacatcttacaagcttatattcatacatcaatgaaaaattaaatttatccatttattaaaataaaaggcaatagcttctatagctaatgccctttatcttaaaatgatttaaatactatacaatttttataaatggctataaataaactcgtatagaatataaaatttatctacagtcttttgttatacaaaatttataacctcttatagaacaaatttaccactttgtaaacttatcacttttactcagctatattataaacttttaatttatctttgtttaaatgtttcttcttaacttctactaaagcttttagcgtatccaaagatgtcattatttcagtagaaaattcaatggctgttcttctcatcttaaatccatctcttgtagagtcatttcctttagttggtgtatttattactatatcaacttgtttatttcttatagcatctaatatgtttggtctaggctcttcaattcgatttactatatcagcctctattccattttctcttaaactcttcgctgttccttctgtagcaacaaaagtatatcctaattctttcatatcttttgctatctctataaactcatctttatcatgattatttacagtagcaagtactactcctctttcatcagacatatgtctacctgctgccaagaaccctttatataaggcttcttctaaattttctcctacacctaggacttctcctgtagacttcatttcaggtcctagacttacttcaactttagataatttagacattgagaatactggtacttttactgatactaattttggctctttgtaaactcctgtaccatatcctaaatcctttaatttagctcctaacatacacttagtagccaagtcaactattggtactccacttactttacttatatatggaactgttctactagctctagggttaacctcaattatatataattcattttgaaattctataaattgtatattaaccataccaagcacattaaggtctaaagctatttttttagtgtattctactatcttttcttttatttcatcagatatattttgacttggatacattgttgtactatctccagagtgaactccagctctttctaaatgttccattataccaggtatcaatatatcttccttatcacatatagcatctacttctatttctctaccagttagatatttatctataagtactggatttttatggtctctatcaaatgcatcatccaaatactgaattagtttttcttcgttataagttatttccataccttgaccaccaagtacataagatggtctaactaatactggataacctaactccttagcaatttcaacaccttcattagttgtccatacaccttttccttttggtctatttatatctagtctctctagtaaatcatcaaatttttctctatcttctgctgcatctatatctctaaagtctgttcccagtataggtatatttttttcatgtaaaaacttagccaattttatagctgtttgtccaccaaactgtagtattacaccttctggtttttctttttctattatatttaaaacttcttcttctgttaatggttcaaaatacaacttatcagatgtatcaaaatccgtacttacagtttcagggttattgtttacaattatagtttctattcccatttttcttaaagattttacacagtgaactgaacaatagtcaaattctataccttgacctattcttattggaccagaacccaatactacaacttttctcttatcactaactactacctcatcatattgttcataagttgaatagtaataaggtgatagagcttcaaattctcctccacatgtatcaaccattttataaactggttgtatattatataaacttctcaattcatataatttttctgggcttatcttcattaagtcagatatacctttatcagaaaatccctttttctttaattcatgtaaatattctttatctaagtcttctatttttagaacttttaacttttcttcttgttctactatccatttaaatttatttataaaccacttatcaacaccagttatttctgatatcatttctactttatagcctcttcttatcatttcagctaagtcaaatagtctctcatcatcaggtactactactctagcctttaattcttctaatgttctaccttctgatggagcatgaaccaatgaatattttcctgtttcaagtgatcttatccctttaagaatagcagcctcaaagttacttcctatactcatgatttcaccagttgccatcatcttagttcctaattttctatttgcatgtctaaatttatcaaatggccactttggtatttttactaccacataatctaatgttggctcaaaacaagcataagtttttttagttactgcattttctatctcatccaaagtataacctaaagctatcttagctgctacttttgctattgggtatcctgtagcttttgatgctagggctgatgacctactaactcttgggtttatttctattatcgcatattctaaactatgtgggtttaaagctatttgaacgttacatccaccttgaacctctattgcatttattatgtctattgatgcctttctaagtagttgatactcttcatcacttagagtttgacttggagcaacaactatactgtctcctgtatgaactccaactgggtctacattttccatattacatacagttatacagtttccatttccatctctcattacttcatattctatttctttccaaccttttatactcttttcaagaagaacttgtccaacaggacttagctgtagtccatgtgaaagtatttctcttaattcttcctcagtatcagctatacctccaccagttccacctagcgtatatgctggtcttacaactactggatatcctatcttattggcaaactcaagacctgcttctaaatttgtaactatatcactaactattactggttgatttatttctttcattacttctctaaataaatctctatcttcgcccttttttatagattctatagatgttcctataacttttacattatatttatctaatataccagcatcatgtaattctacagctaagtttaatcctgtctgaccacccatacctgcaagtaaactgtctggtctttctttttctattattttttctataaattctattgttaatggttctatatatattttatctgcaatttctttatcagtcattatagtagctgggttactatttactaatacaacttcaattccctcttcttttaatgcttggcaggcctgtgttcctgaatagtcaaactctgcagcttgacctattattattggccctgaccctaatactaaagttttctttatactatctaatttaggcataactctttctccttatctaaacaattttcacagttcttatcttcatcatctatacaatcaactttaattactttattttatcttaagttcaaatttactcatcaatacatctatttaatacatctatgttaattaaaccaaactttttgatttaagttattcttgttttttagttagctattctaatgttatttattttactaattctaaaaatttatcaaaaatatagtcattatcttttggtcctgggcaagcttcaggatggtattgaacactgtatacatctagcttctcatgtctcattccttcaacagtattatcatttaaatttatatgtgtcactttcatttgttcaggaacttctgaaacataataaccatgattttgagaagttataaatacttttccttcttctaaatctttaactggatgatttccacctctatgcccaaatttaagtttagcagtttttcctccaagagctaaagctaaaagttgatgtcctaagcatattccaactataggttttttaccaataagagcttttatattttctataacatcttctaggtcttctgggtctccaggtccatttgacaagaatattaagtcagggtttatactcaatacatcttctggagatgttgtagctggaaatattgttatatcacatccacgagctataaatgatcttaatatatttctttttactccaaaatccataacagccacttttggaccatttccttttatatgctctacttcttttcttgtaacagttctaactgcttctgtatttgaaaacttatccaatttatgtttaacatcttctaatttactgtcttctaatgtaattatacctttcattgttccattatttctaagtatcttagtcaaagctcttgtatctattccttcaagtccgataactttattttgctttaaatattggtctatatcaatttcacatctaaaattacttggagaatcacttttctcccttactatgaatccctttacttgaactttttcagactctgctgatgataaatttataccataatttcctacaagaggataagtcatagtaactatttgaccatagtaagaagggtctgttaaaacttcaccatatcctatcatcgaagtattaaatactacttctcctacactttcttctaaatatccaaatgcctttcctataaaaactgttccatcttctaatattaaccttgctttcatactacagtacctcctataattctctttagacaaactaaagaacattaactaaatataagcttttaaatatctatatctatttttcacttttacattctagttttatacttatttacatttattttttatctttttctattatactacaaatttcttaaaaaaaagaagttatctcaaaagtaaaaactcctagaaaaaataacctctttttttttatttaataattaaattcttaaactatacaatcaacttaatttctattcagctatattgtaaacttttaactcatctttatttaaatgtttcttcttaacttctactaaagcttttagtgtatccaaagatgtcattatttcagtagaaaattcaatagctgttcttcttatcttaaatccatctcttgtagagtcatttcctttagttggtgtatttattactatatcaacttgtttatttcttatagcatctaatatgtttggtctagattcttctactctatttactatatcagcctctattccattttctcttaaactcttcgctgttccttctgtagcaacaaaagtatatcctaattctttcatatcttttgctatctctataaactcatctttatcatgattatttacagtagcaagtactactcctctttcatcagacatatgtctacctgctgccaagaaccctttatataaggcttcttctaaattttctcctacacctaggacttctcctgtagacttcatttcaggtcctagacttacttcaactttagataatttagacattgagaatactggtacttttactgatactaattttggctctttgtaaactcctgtaccatatcctaaatcctttaatttagctcctaacatacacttagtagccaagtcaactattggtactccacttactttacttatatatggaactgttctactagctctagggttaacctcaattatatataattcattttgaaattctataaattgtatattaaccataccaagcacattaaggtctaaagctatttttttagtgtattctactatcttttcttttatttcatcagatatattttgacttggatacattgttgtactatctccagagtgaactccagctctttctaaatgttccattataccaggtatcaatatatcttccttatcacatatagcatctacttctatttctctaccagttagatatttatctataagtactggatttttatggtctctatcaaatgcatcttgtagatattgagataatttttcttcgttataagttatttccataccttgaccaccaagtacataagatggtctaactaatactggataacctaattcattagcaacttcaataccttcgttaagtgaccatacaccctttccttttggtctatttatatctagtctctctagtaaatcatcaaatttttctctatcttctgctgcatctatatcatcaaaatctgttcccagtataggtatatttttttcatgtaaaaacttagccaattttatagctgtttgcccaccaaactgtagtattacaccttctggcttttctttttctattatacttaaaacttcttcttctgttaatggttcaaaatacagcttatctgatgtatcaaagtctgtacttacagtttcagggttattgtttatgattatagtttctatgtccatttttcttaaagattttacacaatgaactgaacaatagtcaaattctataccttgacctattcttattggaccagaacctaatactatcacctttttcttatcactaacaactacctcatcatattgctcataagttgaataatagtaaggagatatagcatctatctcacctgcacaagtatcaaccattttatatgctggtttgatattgtatagacttctcaattcatataatttttctggacttatcttcattaagtcagatatacctttatcagagaatccctttttctttaattcaagaagatagtctttagttaaatcttcaattttcataacttttaatttttcttcttgctctactatccatttaaatttatttataaaccatttatctatacctgtaatttgttctatcatctctactttatagcctcttcttatcatttcagctaagtcaaatagtctctcatcatcaggtactacaactcttttctttaattcctcaatgcttctctcctcagatggtgtgtgaactaatgaatattttcctgtttcaagtgatcttatccctttaagaatagcagcctcaaagttacttcctatactcataatttcaccagttgccatcatcttagttcctaattttctatttgcttttttaaatttatcaaaaggccattttggtatttttgccaccacataatctatagttggttcaaaacaagcataagtttttttagttactgcattttctatctcatctaaagtataacctaaagctatttttgatgaaactttagctattggatatcctgtagcttttgatgctaaagctgatgatctactaactcttggatttatctctataactgcatattcaaaactatgtggattaagtgcaaattgaacgttacaaccaccttgaacttctactgcatttaatatatctaaagatgcttttttaagcattgcacattctttgttacttaaagtttgagttggagcaacaactatactgtctcctgtatgaactccgactgggtctatattttccatgttacatacaactatacaatttccctttgaatctcttattacctcatattctatttctttccaaccttttatactcttttcaattaatacttgtccaacaggacttaattgtagaccatgtgaaagtatttctcttaattcttcctcattatcagctataccaccaccagttccacctagtgtgtatgctggtcttacaactactggataaccaattgtaagtgcataatcaagacctgcttgtaaatctgtaactatatcactaactattacaggctgatttatttctttcattacttctctaaatatatctctatcttcaccttttttgatagattctactgaagtacctattatctttactccatatttatctagtatgcctttttcataaagttcaactgctaggtttagccctgtttgtccacccatacctgcaagtaaactgtctggtctttctttttctattattttttctataaattctattgttaatggttctatatatattttatctgccacttctttatcagtcattatagtggctggattactatttattaatacaacttcaatcccttcctctttcaaagactggcaagcttgtgttcctgaatagtcaaactctgcagcttgacctattattattggtcctgaccctaatactaaagttttctttatactatctaatttaggcataaatttttctccttatctaaatggtttttactatctgtaaataatactaaatctatattaatgctaagaatttattaaatatacaatctaaatcttcttttgttgtgtattctggaatgtactgaacactatatattggtaattccttatgtctcattccttctatagtattgtcatttaaatttatgtgagttacctctgtattttctggcatttctgaaacattatatccatgattttgagaagttataaatacctttccagtttctaaacatttaactgggtgattacctcctctatgtccaaatacaagctttgaagtctttcctcctaatgccaatgctaaaatttgatgtcctaaacctattcctgtcaatggctttttgcctattaatttttttatattttcaactatatcatttatatcctctggatttcctggtccattagataataagattaagtcaggatttatatttaaaatttcttctactgtagtcattgctggtgctatagttatatcacagttacaagctttaagagactctagtacactatttttaacaccaaagtctataactacaactttagctccagtaccttttatattttcaatttcttttcttgtaacattttttactgaatctttgttacaatgctcttctaatttagactgaacatcttgtaatgatacattttctaaagttataattcctctcttagttccattgtttctaataattttagttaatgctcttgtatctattccttcaagtcctattaccttattttgctttagatatgtgtctatatccatttcacatctaaaattatttgggttatcacttttttctcttacaataagtccttttacttgcaccttatttgattcaacatcttctaaatttattccatagtttcctataagtggataagtcatagtaactatttgtccataataagttgcgtctgtcaatatttctccatacccagccattgaagtattaaatacaacttctccaatagcttcctttagatatccaaatgcttttccttcaaatactgttccatcttctaaaattaatttccccttcatataagctacctcccaaatattttatctaagcattttctatttctcttacaatattaatagctgattctcttggattttctgcttttgttataggtcttccaacaactaaataatgagcacctttttttattgcatctgatggagttacaactcttttttggtctccaacctctgctgatttaggtcttattcctgggcaaactgttataaaatcagctccacatgcttctactattttatctacttcttgcgctgaacaaacaaccccatctatgcctgattcttttgccagtttagctctctttatagctaactcttctgttgtcatattacatcctatgtcctgtaaatcttggttacttaatgaagttaaaactgttactccaactactaatggcttttctatatttaatctttctgcttcttccctagcaattagtgcacattgtctcattccttccatatctgatacatgtattgtcattaaccaaacattatctctcactgcagctctcactgcacttttcatagtatttggtatatcatggaatttaaggtctaaaaatatttttttccctttttctttaagataatctattgttttaccttttgtggcaacgtattgctctagacctaccttaaatatgtctacactatcttctaatctgtctattagttctttagctttatcaaattcgtcagtatcaattgcaactatcaatttttctttaccatttatcatttttacatctcctttttaataaagcctaaataatcataaaaaaatcctcacaccaaaagaggcataaggattttatctatacataactccattcattagctatgagatatctttcccagtctctctggactagtttaaaagactttattatatttaaatttttattttatactcatcaaaaacctctagaagatttactagaggttatatactaacattatctataaccctttagtctctctggactactttaaggaatttagctgtaatatttttctttatttatataactttatgtatctataggataatttaaagttttatcttttttataattaaaccactaattgctttttatgtcaataagtctttgaattattcttcatctttatcaaacaattttttctcaaaatatgattctgcattatatattgcagcaactggattatgcccagttactctatctttgacaactaaagttgttataggagcttccatatatttcatggctaaagtatcgtgaccaacacataatccaagaattacattaaggtcaaccttagcttcatttaaaaataaagcttgtcctattggattgcacattacctcatctgaacactttgatattgtttgagatgcttctagtccaattgtactcttaggcattgccccatttttacatataacagaaaatacttcaaacccatgatgttcaaatattttttgtgctgtttgcatttctctttttagtccaatacaaaatgctatgccaatctttttataaccacactttttagcaaactctataatctcttttagtctagtatattgacaatacccctctgcttcaactaatccagcattataagctatttttctattctcttcttcttcataaagttgctttgctttttgttgtagttcaatttctctagttggacatatcttcattaatttatccatatttccattagaacagcctctaagattacattttccacacttatacatatccaatatccccttccaaaattttattcatcttgtgattcttctttttctagagttacattttcttcttgggtttcttcttctggtttcacatgctcgactacagttataaaatatgattttcctattttattccttataggaagtttttcatatgaaacatctattttattttttatacaagctatatcaaaatgtcttaaggctacacctaagctaaccttattcatatcttcacagtgtttcttaggtctcttttcaaataaatgaagacctcgttcatccttatggaaataccacggttgagaattttttacagatggagctcttcttgtcaattctaagatatctttccactttctattcctatttatcttatttatcatatcttttactggctttctatcaggtctagcatatctcgtcctaaacaactcttcattttttgctggatatccaaatgctattattatataaggattttctattttgttttcatcatcttcttctgtttttactccagctagataatctaaatcatcttcctcatcttcttcaaaattcttattcccaatatctacaaattccaagatatcttctctctttaagtttccttccaaccagcaagtagctattcccaatgttgtaaggcgcaaaactacaccttctgtagcaaatcctatattctgtaaatagtcctcacctttgtctgatgtaactactatataatgaggtgcctttactttacattccttacccatcaaaaaatgtattatatgacctctatcaacaacatgtgctttaatatttaaatcttcatttaagtattctaaatttttacaacttctttttatttcttccatcaatggcttttttatcttcttactggaaaaatttcttacagattttctataaaaaatggcttcataaagctccatttatgccctcctaactgaaatcttctgacgtataaactctataaatttatataaatactttatattttttatagttttatttcctttttcctcctgccctattttgaaattcataagaatatctactctagtttaatatagcattcaaaaggcttaaattctaccttatcaatgtctatacattagcataatttttttatttgattttctatgctaatttaaataacaacactagctattacctttttaattaagctttgccagaaaaatttttttcatttataaatatctatctcattattatattataagtttttttcggtattcttgtatagcttttcactaaaaaagtatttttatttctactttaatattattatcaacaaaaaacatactgcttaaataagtttgttatcctcataatctgttttaattaaaatattttttttatttctcaatctataaagtataaatattttgaatatgacccaaaatctaagtaaagttataatattttataagttgttcaatattaaaaacataagtaatgttataatactttataagttattcaatattaaaaatataggaggataaatatgaatttaaatagaaatttagaaaaatacgctgaattagcaataaaagttggagttaacatacagccaggtcaaattctacttataaagtcaccaatagaatgtgctgattttgcaagaaatgcacttaaagaagcatataaatgtggtgctaaaaatgtttatatagagtggtctgatgaagaaagtactcttattaaatacttgtatgctccagatgaagcatttcatgagttccccaaatggacagcagaacaatatgtagatatagcaaaagaaggtggggcatttttatcagtctatgcccaaaatccagatttattaaaagatgttgaccctgaaagagttgcaaattttcagaaggcatctggaaaagctttaaaagaatggcgttcttacactctaactgataaatgtaaatggagtatagtctctgtgccaacaaaagattgggcaaaaaaagtgtttccaaatttatcagaagataaagcaatagaaaaactgtgggatgctatatttaaatgttcaagagtagatggtcaggaccctataaaagcatgggaagaacataatgaaaatcttaaatctaaaatggactttctaaataaaaataactttaaaactttaaaatataaatcctcaaaaactgatttgactctagacttgccaaagggtcatgtttggctaagtggagcatccaaagaccctaatggaataagttttaatccgaatattccaactgaagagatttttggaatgccacataagtttaaagtaaatgggactgtttatagtacaaaacctcttgtttatggtggaaacataattgacaatttcttcttaacatttaaagatggtaaaataatagatttctctgctgaaaagggattagatacactagaaaaacttattgaaacggatgaaggctctcattatttaggagaagttgctcttgttccatacaactcaccaatatccaatacggatataattttttataatactctatatgatgaaaatgcttcttgccactttgcaattggttctgcttataagacttgtctggaaggtggaaacaatttaaaagatgaagaattagatgaacatggtgtaaatgacagtttaacacatgtagattttatgattggttctgctgatatggatattattggtgagacttatgatggaaaacaaatacagatttttaaaaatggtaattgggctttttaacatatgattttaactaaaaagggctaatggaagttataccagacttcccagccctttttaatgttgatgataaatattttttatattaattaatctcattattatagattaattcctattgttttaaacataagtatctaaaacttatatttatattatatataaaatatcctatttagtaaaacctttattttaatttatatgctaaaaatttaactttgctatttcaacagcagactttgcatcctttgaataataatcagcgcccatttcttcagcgtattcttctgtcaaaactgcacctcctacaaatacctttgcatttatctcattatctctcagtgcctgaattgtatctttcatactttgaacagtcgtagtcataagtgcacttaatcctactaattttatatttctctttttagcaacttccactacttcttcaatagggacatctttacctaaatctataacctcatatccataattttctagcattatttttactatatttttcccaatatcatggatatcaccttttactgtagcaactattatttttcctttggatacattattgctacttttacttaataaagtttcctttattgtatttaatgaaacttttaccgtttctgctgattgaatcaattgtggtaaaaatatatctccgctatcatatctttttcctactttatcaagagcaggaattaaaatctcatctaatatgtaattttcatccttctcttttaaaagattcagtgttacattttttgcttcatcttttaatcctctttcaactaaaatatccaatggcaaatctttgtcaatctttgtagatgaatccgatttttttgaattatttatattactatattgatttatatagtttatacatcctttatctgtgttatttaatattttaaaagaattgatagcttccatcatactatattcatttggatttataattgctaaatcaagccctgcccctaaagctaatgttagaaaagaagcattaagtgctttcctatttggaagaccaaatgaaatatttgaaacacctaatatagtttttactcctagtgtctttaccattgttatagcttttatagtttctattgcttcttcttgttgtgctgaaacagttaatgataaacagtctataaatatatcttttggttttatcccacaagaaactgctctattgactatcctttttgctatttcaaatctttcttcagcctttttaggtatccccttttcatcaagtgtaagtccaaccacacatgaaccatactttttaactattggtaatatactttctaaagactcctctttgccatttacagagtttactattgttctaccattataatatctaagtccttgctctaaggcctctacattggaagaatcaacttgtaaaggtgtatctactactgcttgaatctctcttattaattttggcattagttttttttcatcaatctctggaagaccaacatttactccaagtatttgtgctccagcatttacttgttctaagcctaaatttatagcataatcaacattttcattttttaatgcttcttgtagagattttctacctgtgggattcaatctttctccaacaactgtaggcgattgtacttccacaaattttgatggtgaacagactacacatttatcaattttctcgatacatccctttgtaacagaatttatattctcagatatttcttttataaaacttggattcgtaccacaacatccacctattatagtagcaccaacttcaacgaactttttaaccccttcaaaaaattcttttgcatcaacatcatatatagcctctccatcaactatatttggaagacctgcatttgcttgaaccataacagggactgtagctcttgatgctattttttcaactattggtaaaagttgtttaggtcctaatgaacaattaactcctattgcatctacacctagaccttctatagtagccaccatacattctggcatacatccagtaaaacttcttccaccttcatcaaatgtcatagtacagaaaataggtaaatcagagttttcttttgctgctaatacagctactttagcttcatataaatccatcatagtctctattactattacatcaactccagatttaacgccttgtagtacttgtcttttaaatatctcatatgcattatcaaaacttaaagtacccataggctctagcatttctcctataggaccaatatctaaagctacatatcttggtttagtattatctacattttctatagcttttctagccaccaaaacagcattgtcaatcacctcttctacagtatacttactatctaattttagttcattacatccaaaagtatttgtaagaattacattcgaacctgcctctaagtatgctgtatgtatttctataagtttatctggattttgaagaccaaatacttctggattttcacctaactttaaccctttttgttgaagcattgttcccattgcaccatcaaatattaatatattatttttcagatattgtcttatttccacaagagttcgctccttttctatatgtacagtttctatagtttttacaattttcacacgacttttctttcttagatttatttattcttgtattagaaatacctataatagccactactgactttctcggtatcataattccattagaagtaattgttagacctatttgtttttgagcattcaaaacgtttaatatatctatatttttttctattggtaaatctccatatcctgggctatatcgcatagttataaatttatcttggtttaaaaaaaccttttctaaattattttgaacaatgtcacacacttcttctattgctgttgttccacatgaatcaattattagtccttttgttaaatttgaataagagtgtcgtcttatttctttttctatatctatccctatagtagctgccataattacacactcattacattcttttaaaagttcatatacatctttactctctaatgttaaatttgttccctctaattctacaacattatctttatttattctaataggataaatcctagataaatatctaggatttattttatttttagttatagctacacattcatcaatagtatatttaaggtctttatctatctcttgacctctgtattgtaaatatcttaaaacttcactttgatttatgcttatatcttctcttccaattaaattattctccatatatatttaaagaaaatcctttatctaaaacatcttttgcatattcctttgccccaaataaagataagtctctgtagtttccacattctatggctgtagctgctggcattttatctgattcaagaactttttttaatgcttcttctaaaccaatcttaactgttttggcatctacatctccccatagtattaaataaaatcctgttctacatcccattggagataagtctattacaccatctaatgtatctcttaaataagtagctaaaagatgctctaaaccgtgcatagcagcagttccaaaactttctacatttggctgtaaaaatctcaagtcaaatttagttactttatctccctttactccatcaagtacactacactttcttacaaaaggagcttttacttttgtatggtctagcttaaaactttctactttttccattatttaatcctccattatactttaaagtttgttacattaattctaaaaaaaactcttcctatctattattgataagaagagtatattatttcaagtcatctcatcgttgttagcaggaccacctgataaaaggttggtataggatcactgagctaactctctcccctaattcttgataagtatcttattaaactgacttaaattatatatcacttttttatttttgtaaacactttattgttataatatttatatcacataatcgtacttttattttataactaagctgattgtattattggcagttgtacctcaaacacagtttgatatttatcgcttgaaacagtaatttctccatcatgtaaatttacaatattttttgtaatcgcaagacccaatccagaacctccaacatttctatttctcgatttttcaactctataaaatctatcaaatatatttggtaaatctaacactggaattggttctccataatttatcacttttacaaccgccatatcttccattttctctgtgactatatctacataatgcccatcttttccatatttcacagcattagttataagattttcaaatgctcttaccaatttatttggatcagctttcacaattaatttttcttcattaaaattaattctactaaccataaattcttgtttaaaataaatttcaaattgagatactacttgacttaataactctactaaatttatttctattttgtttagttttattgtattattttgcattttagtcaattcgaacaaatcatttataagaacatttaaatttttcgatttttcatatgcaatatcaacataatacatcatctgaacttcatctttatacttaccttcttctatcactcctaaataacccattatggatgtcaaaggtgttcttaagtcatgtgacacatttgttattaaatctgtttttgtctgctgagcttgtctctcttcaatagttatatttctaagttgatggactatattattgattttatgtgctagttcatcaatatcatccttttctttatcctttaatatatctaaatcatactcaatatctatacttttttctaagttaccttcatccattaaatttacagcacttttaatgatttctaatttttgattttttctattagtctttcttataaaatctacaatttgcttatttctcttgtacgatatcatggaataaattgctaatgatgtgattgtaaataaaaatggataaaataaactctctcctataagacttctgaaatctcttaactgatatacaagttgattaattacagatatctcactattgaaatataataattttattatatacatacttgttaaaataagcattgaagttaaagcacagcttattataagatctaatatgggtcgaaacatatgatttaataaacttttatttttcaattttatatcctactccccatacagtatgaattattttttctccatctgtatatttttcaattttatcccttattctgctcatatgaaccattacagtattattagattggtaatatttctctttccataccttttcaaatatttcttctgtactatatactctgcctttattatttgctagtaaatataatatatcaaattctcttgatgtcaaaattatttcatttccagccactgttacactatgtttttccttatctataattactactccaacctttatgacatctttatcttcattattagcaccactaaaataatatgctcttctaatcagtgatttcactctcacagtaagttcaagtgggttaaatggttttgtcaaataatcatctgcaccagtcattatcccttgtattttatccatatcttctgattttgcacttaacataagtattggtatattcaaactttctctaacttttctacaaacttctatcccatccattttaggcatcattatatccaatatcattaaatgaatattttccttttttaaaatatctagagcctcttttccatcttcagctttaattacattatatccactatttaaaagatatatctctataaggtctcttatttccttttcatcatccacaacaagaactgtattattcatttttacacatcctaacttaatctttgtatatagctttattcatataaaattatactatattttagttagtgtaatctataaatttattcatttctaaatttccaatataatacaaattatttacacatttatattatttattttgtaaatattcttctaaagttaatccttttgaataaatttcctcggcagcatccttaccaacatatctaatatgccatggttcatatgctgtacctgttatatcttctttaccttcaggatatcttattataaatccaaacttgtgagcattttctgccaaccatttagcttcttttgtacttccaacaaaccatctttctggatttgttaaatcaatacaaagtccagtttggtgctcactgtaaccaggctttgctacatatgcatctgccttttctcgtccctgagattttacccttcttgtataagtatccagttgagtatcataagatctgtatgctgaagaccctaaaaactgtattccttctgaattagcttgcttaactaaatcttcaactgcctttgcaggttctcctgccatttgtttttcttcctctgttgcttcttcaacaaaaggtatgtttaccttagtaatattttcaggagtatagtttttgctaattccatttgtcttgtttaccaataatatatttgatatactatttgagtgatttttattttgagaatttgcctcaacatcttgttctgaatcatgttgagcagctactattggatctttatctttcttaagtaatctatctttagatataaatacacttataaatactactaaaataatggctcctattaatttaaattttttcataattaaatcttctcctttttgttatgtttgtctataatgttaattttagagtataagacttaagtattttataagtaaatcttaaataaatcttaaatttaatatttttaaaggatggtgataaaatgtctatacaaaaacttctaagtaaagctcgtaaggctatacaagattttgatatgatacaagaaaatgataaaattgcggttggactttctggtggaaaagatagtttaactctacttcatatacttaaaagttatcaaagattttctccacaaaactttgaattgatagccataacattaaatactggaggtgttgataattctccactagataaattgtgtaaagaaataaatgttcctttttatgaatttcaaactgacataaaagaaattgtatttgatataagacaagaaaaaaatccttgtgcattatgtgctaatttaagaagaggtgctttgaacgataatgctaaaaaacttggatgtaataaagtagctcttggtcatcataaagatgatgcaattgagacatttttaatgtctatgttttatgagggtagagtaaattgtttttccccaaagacatacctagatagacaggatttaacagttataagacctatgatttacatagaagagtatatgactaagaaaatttcaaaagattctaactatcctattatcacaaatccctgccctgcaaatggtcatactaggagagagtacataaaaaatcttattgctaatttaaataaagagatgcctgattttaaaagaaatgtatttggcgctttaaataattctgagaaattgtttatatgggataaagagaagataaaaaattttaaataataattaaaatttttaaataaaaaagcaagattgtattaattataaataatctttatataatctacacaatcttacttttttatttattatatgttattatctttaatctatattttaatagttcttaatagtatttattttgtctaatacattaattataacttaaatattttatatattaatttaatatattaattcattcaatctactggtttaatccatttttacagtatatacatctacatattataaaaagcaaaattatattttctaaatattttatgttagattataatattaaattctattatctctggtatattaaaaaatctaaatggtaactttgtacttccaagacccgaactcacatataaatgatttccatttatatcataaaaccctttagtatatttcctcccatatggaggagtaactaatgctcccttaataggtaatcttatttgaccaccatgactatgcccagatagaactaaattcattgtatctttactaagcatatctactaaatctggttcatgtgctaacaataaattaaaatttttattatctatctgactctccagatattttatattaggatttccatttaatatttcatcaacacctaatatattaatatatttatcatcttttaattttatttttttattttcatttactaaaagattgaagttggaatttttcataatctgcctataatacctaggaagtttatacatataatcatgattgccaaatactgaaaattttcccaacctagcattcatacttgataaaatagttgtaatttcatctacacttggatttttattggagtaatcaattaaatcaccagtaaatactattatatctggattcaaagtgttaatcttattagctacttttttgagattcttagttgaataaaaactacctatttgagtatctgaaatttgaactacttttacactttcagatttactctcaattgtatcattttttatcaatgctccattttcacttatattatattttttcacaattaatagactcggctctatcgcaactgagtatataaaaatcaaaataaatattaagataaaaaattttaaaaaatacttaatttttgagttcaaaatatctacctacttatttatttttttaaactatttgcattacagactcaactttgttcatttttctgtcatgcatttttggcttatttgctgaaaaccatttatatgttgctgtaagaccttcttttagtaacacatttggtatataaagcccatgttcaataagcttatttatatcaagattaaagtctatatttctaaatgggaaatacgttctttctctaaactctactttttccatatctacatattttattataggttctttgccaataatttctccacatgtatatataaggtcatcccaagaaattaactgtggatttgtcacattataggcctctcttacatgaggatttttcattatgctttccaatacctttaccaaatccccaatatatataaattgattactaacttgttttccttttggtactggtatcttttcatttttttctattttttcaaagaaataatactctctatataaattattattttcaccatatatgtaagttggtctaataattatatatggtatagggctatttataataaaatcttcagcctcttttttatttaacccatattttccccagttttcattttcacctttctcattttcttcttttatatttcttccactatctttatatactgctcctgctgacaatactatatacttttttaagttatccatgcttataaaatcaatcagattacttacatcttcttttgtatatgctgtcatatcatatatgtaatcatattttcttcctgtgataatgttttccatatcttttcgaacttttctatcacaaattagatgttctttaaaaccattataatctatttcctttttaccatttgtaagtatatcaatttgatacccacatttaatcaagcgcttagcaagtgcagaacctatgaagtcgcttccacccataattaaaatagatttcattttaagtgcatcctcctcttttttaaatgacttccttaactataatatcatatttttaaatatgcgacaccattttgtaatatttttgtctataaaagatatttataacaaaatatcttttatagactctacattttcgacaatataagtaggttcactttcactaagctcttcaaaagaaccatacccatacaatactccaatagaatctatacctatttttttagctccaattatgtcatactttctatctccaaccataataactttatctttatcttttacattacataggtctagtacatattgtataacttcatttttattcactcttgtaccatcaagattgctacctgctatatatttaaaatatctatctatatcaaaatatctaagtatagtttctgcaaaaactgttggcttagaagttgctactaataatattttaccatttttatagagcatttctaatatctctttcatattctcataaattttattttcaaatatccctttatcagcaaaatattctctatacttttcaacagcttctttagcttttttatcttcaaatttataatactccttgaaagtatcatgtaatggtggtcctataaattggtctaagttttccaaatcttcttttatgccaaagctatttaaagaatactgaatagactttgttattccttctttagggtctgtaagtgttccatctaaatcgaataatactatttcataattttttttcatatttcagtcctccatatttgtaaaaagtaatatcttacatattaagtttatctattttaaaaagctatagtaatagaaatttctaatactatagcttaagtacccaattaaatcttatatatttattttaaaaataaatttaaacagctctatttaactgttatagctgaaactggacatccttcttcggcttctttacataaatcttgtaaatctgctggtatttctccttcaattgctactgaatgcccttcatcgctcatactaaaaacgtctggacatgttcctatacatgctccacaagctacacatacatccttatcaacaaatgctttcatactaaaatacctcccctaaaattattattttttaattgttgtttccttagatatttatccaatatataccaatttaaacatatatttattattttatcactattgtttagtttattatagtattttcgtatccatgtctataaacttcactgcttttcatccatgattttacagtatattgcaatcttaattttttatttaaaacaagttcattattattgtagtcttttataatatcattacactcctccattgtgaatattgtaaaatcaccttctcctccaatctttattctgcctttatttccatgtaaatcgaaaatctttgttgggtattcagttactttttctatacacttttctagggatatcccaagttccataattttatttataacatttaaaagagaatagtttacgtctttcatgttttttatatgcatatcagtacttattaggtcaggctctaaaccttgctttattgcttttttaaaaactttaaaatcaaattggtccactccatgacatacatcgaacaatactcctctattctttgcatttattactgattttcttaatgtgccagattctttaaggattccatttgtactatttccatatactggtgtaaccacatctccttttcccaaaatattcattacttcatctatatatgatggatactctcctatatataccactaagggtaaatttaattttttagcaacttgctttgatttcttaattatatctataccactttcattagattgaaatttactcgcttttacttttataccctttatcttttctatatttttttctacaattgactcaaccttgtcaaaatttataacatctaaagaagttgattcattcaatatatttagtccctcatttgtaacatttaaaaaagaatatacttctgttttacactcatccatatacttttttttaaaatcatagtagtttgagggaccagctgtacctgcatcaaatataactgtagaacctttttcaattccaattgaatcagaatccatacctgtaggtaattttctcttataacaatgggtgtgaacatctataaatcctggggaaatatacatattatcggcatttattatctcgaactctttatttgtaagtaatttttcttttcttattttctctttaaggttcaatccaatagcatatattttcccatgtaaaaccaagatatctcttttttcaaatttgataccatctgttggagatattattgtcccatttcttataagtaaatttttcatttattccacatcctaattacaatataatttctctaatagcttttcttacataaagaaaataagcctaaaaataaaaatattttagacttattcactatattatactatattaattatattaaattaaataaaatctttaatttactttaagaagcaattaagtatttgttgctcggcttcttcttcagtaagacctaatgtcatcatctttagtatttggtctcctgcaatctttccaatagctgcttcatgtactaaaagagcatctggatgatttgcagcaatttcaggtatagcactaatttgagaatttcccataattattgaatcacattgaacatgtgcagaacaaagggaatccccaataacacaaggattaaacttttgcttagaattatcttgcccaactgtacgagaaactacttgagcagaagagttttcaccctctaagataaccttcatattagattctgcaacttgattaccatgagttaataatttctcaaatacaactattttagctcctttacctaggtttgcatccatttctcttttagttgaatctacacccttaatttgaattgtttccatttcacaatatgaatcctcatccatattgacaatagtaactggatttaaaattctctttccttctccatcaccttcaccataatgtttttctacatattttaggcgagctcctttacgtaagaaaaatctatgtataccattatgttcactatcatcacaaccacagttatgtataccacacccagcaattataacaacatctgcattttctccaatttcaaaatcattatataccatatcctgtacaccagcctctgttactattactggtatatgtacattttctccttttgtatttggctttactataatatctattccaggtttatcagttttaggaattatagttacattttcagttgaatgtctctctactccttgcccatttttacgtatattgtatgctcctaatggagttccacgaagttcagcaactttttctaaaagatttaaatctattttgttcatttaatttgccttcctttctaattaattcatgtctttcattaattcacaacttgaattaacttgacacatgatttcaggtaatatagcctcttttgttccatggctttttactgaaccatcttgtagaacaattatttcatcagctaactctaatattctttcttggtgagaaattatgattatagtctgattagactcttcatgtattttcttaaaactttcattgagttttccaaagctccaaaggtctatccctgcttcaggttcatcaaatatagaaacctttaaatctctagcaaaaagagttgctatctcaattcttttcatttcccctccagaaagagagttatcaacttcacgatttaaatagtcttttgaacacaatccaacatctgtaaggtattggcaacatacatcagtagacaatggttttccatgagcaagtgtaagtaaattttcaactgtcataccttttattcttggtggttgttgaaatgcgtatcctattcctttttttgctctttctgtaatactaagatttgttatatcttctccatctaaaattatctgaccactcgtagctttttcaattcccataataagcttagcaattgtagattttcctccaccatttggacctgtgataacaataagttttcccctctcaaatgaaaggctaacatcatttattattcctagttcctcattgttagactcaacattaaaggaaagattttttatttcaagcataatacccctcttttctataaaatattacattaatatccattcttttattatatcagtaatttttatatatcagcaactctaagcagataaaatgtatattaaataataaaacaaagttattgaaaagtaaaaaagatgagttttatgtaaactcatctcagaaatttagtatatcaacttatatgtatttaaaatttaaccttctatatactctaatattattttttgattatcttttaacataatttcttcttttttagattctattccattcttttttatctttacctcagctacaaaggcatcattaccttcaaccatttctaatagttcatacgcttttttacgacctattttagttgctatatcttttagtactgccattttcttaaacattttatcacctctactcaaaatttacacttaatttttaattatataattctaatcctagactagtttataataattattgtctctaattatatcagatattgagtaaatttaatactttgtaaaattatttatcctctctgactaaataatcatttccatcttggtctttaaaagaaaacatccttccatatggcatctccattaattccccaacttcaacctcgttatttgccatttgttcataagttccattaatatctcttgtacttaaaattattgatggatgagatacatttatctctttgttttgcttcatcattagatttttatcatacaacacaaatgttgtaaattcatttttacttggtgctacttccacccatttcatatttggacccatttccttttcataagttactacaaagttcaatttttctgtccaaaacaactttgcatcctcttgattatttacatagagagttatttttcctattttatttatcataacaatacccacctttattattaaataaatacctaatattttttatatttaataatatacccatatatattattttctatagatatatatttctaatatttatcgccaaattatgtaattctgctcaatatataatttataatatccatactattatagcctttatttatgtaatttaataaccttatatatcatacttataattatgataataactacataaaaaatcacttctaaatagagttatccatctaaaagtgatttcatatattctatgcaactttgtgttttagccactttgttcctcttaatcttaaacaatataaagtccctctaacaagccaatcagtatacatacctatccaaattcctaacactccaaattctaatacaacccccaatacgtaacctgtaaaaattctaaaaatccacatacctattactgcagtcatcattgtatatctagtatcaccggctccctttagccctgctgataatacaaaggatataggccatattaccatagctaaacaatcacttcgaattaattgtgttgagatgtcaattacactagcattttgagtatacatacttgaaatccagggtgcaattggtataaatatagctcctactataaataaacaaattgttgcaaatttagttaaatataataaagtactcttagctcctttaatatctccacgtcctatatactgtcccaccaaagttgtagcagacaaagctaaagcattcccaattacatttattatggatgcaattgacattcctattgcattggatgcaattgctgatgttcccatagtaactataaatacttgaacaatcaatttacctgcattaaaaagtagttgttcaactccagctggtatccctatattaaatatagacttttgagtttcaacatcaatcttaaatggaaatattttacccatagatataaattcatttcctttaaataaagctcttataattactatacatccaattattctagctatagcaatagatatagctgcacctgttatgccataggatggtgtttgcaaatttattcctagaggatttaaatcaataccatatataagtatatatcctaatgttacatttactatattcataaacatagtcacatacataggtttctttacatctccacaccctcttaaaataccatttgctatttgttgtgtcgcaataaatggatacgtaaataatgtaaactctatgtataattttgcatttgattttaccaattcttctgctgaaccataaaataaattaattacaccagttctaaaaacccacatcaatattgttattgtaaaggataatattactccagacactagagcctgcttaatagtttcattcaccttttcactatctttttttcctatttgttgagctacaacgacagtagctccaacagataatgcagcaaatacagatataaatatattgtttattgaatcaaccattccaactgcagatacagcttcttccccaatatgacctgccattattgtattaaatactcctaaaagcatgacaaacgtctgctctatcattataggaattgctaactttataacatttttccttataaacatccctattcctcttttccctctttatataaatttaatttttaattagtttatcgaactgtaaattgacaatgcaaagtttagaattgtattgttcgcattataatatactgctttcaaataatataaatcttgtttaatatcatttgaacacagtatatctttataattatcttatgtttattattttttatggataccacatttaaaatatttattaatttaatataaatattttccgttattattaaaagtagctatatttcgttaatattgtatcactatcgtgtagcaataacaataagtacattttatatattttttataatattatttaatcatccaaacttttaccactttttcaatatataaaatattacactttagatgtaacaaaatcgcatccatttaaatattgtattttatagactaattttaggatgtgatactttggttaatttaaatgcaaataatctaaatgtaaatatggtttatcctatttcttccacagcacccatacgtttcagaagatatactgtttcatatttagaaaacatggaaaatatttatttaactatagcaacatactttgatacacttggtttaggcacaatgaatatcgacaaagtttatggtcaatgggcttggtttactgataatatatatgatttaaatctatttgtttttgtaggaaattatccttatcaaattgctaaaaacagatatgatacatttgtagatattttgccagtagctattacttctattgtcaatggagatagagtatttttaatttcaaatccttgtttgttaaattcaaaaattacagttagatttatatctagtcatcctactcttaatagaacagttgattatggcaatattagagattttattttttaaaactgcaacatgatgtgctattaaaaaataccctaaatttaatgatattattaaataactagaatatttttaattggcacatcatgcctagctattataaattcataatattattttacttaagataagtactgtattttatctacttgtatatttttatttacctagtttctcagttctatatcctatttctttattagctagcttataaccttcttgtatcatttcttctctcgttaatgcactccctaataaattgtcaatactcagttgctctctatcactaaaatacttatccaataatgattcctctatatcttcctgatatgccaaatttccttcatgcattatatattttacatcgaaaccttctttatttaatacttttcccaccaaaatacttctatgacatcttataggttcttgcatagctcctaataaaactatcctataacccatttgacaacccttttttaatctttctattccgtttaaaaaaatatcttcttttgctactttctcaaaatctgcataaccttcttgcgtatatacatctttattatttcttttagctccaaattcttttcccatgtatatatatataaatccggaatttctaagagattcgttaaatgcctctttattgtattgaatattatatttagaatatggagtttctctaatgtcaactacacaatttatgtcatatttttttatcatattaataagcttatcatatggataatttgaatgtcctattgcgaatatttccatataaataccctcctattctttgaaattagtatctatatatgtagatacccgatttacttaaaattaaataaagtattactttaaatacccaatatctttttttcttgatactgtatatttttttactttatatccttaaaaaaatatacaactttatatataaaacatcaatatttatatatattttgtatattaaatacaattatttataaaatctttgataaaaatttataaatagagcatctttagaaaactattaacagaaaaacacactaaaaatttgattatccgctaaaacactgtatctatcggcattatcaaggagctaaacacatcaaaatactactaatttactacgattgaatgagccttgatacgtcctatttcccagatatgcaaagatacggtacagcacatcagtattgaaacaagaaaaattgaatacttcatagactacggaacgcacaatatcagcgttccttttctatttccagccgttcctagtggacggctattttactaccaaaatgaaaggagcatttagaattatgaaaaagatattaaaacgattgtgtacaggctttcttgcctttgcaactgtcgttaccgctttaccgagttcaacggttcatgcgtctaatacacagtattggacggaaagtaaagagcgtgtcagtatcgtagaacaagtaatgaatgacggttctatcagttctacctttaatgagggacatttaaccgttgagggtgaggacgcttattgtatcgacatcaacacagcctttaaaaacggctataagaccaaagctgacgcaagtacccgtatgagtgccgaccagatagctgacgtcgccttatctattgagtatgtgaaacagtacacagacatccacagcggaataagcagtaaacacgcctacctattaagacagcttgttgtctggcagagattaagtgttcagcctgactggcaatgggataatgtgcgagcttcctatgatgaaatcccaaaagccgtacaagatgaagtattcgcaggagcaaaagcctttgtgaaagaaaacaaaggacgttatgactgtggcggatatatctactctggcgagggtcaagagttagggcaattctgggcgaagttagctgtcggaaataccaaacttcaaaagacttccaccaatgccaatattacagacggcaacgggatttattcaatcgctggtgcaacatacggtgtgtattctgataaagactgcacgaaacagcttaccacccttacgactgatactagcggaaatacagaagccgttgaagtaagagccactatagtatatatcaaggaactttctgcaccagcaggatttaaaattgataaaacagtttactctttatctgtggaagttggaaaaacagcgactttaaaagtatctgatacaccaaaagtaacagataccttgattgagctattcaagattgacatggaaacacagaaatccaatccgcagggaaacgcttctttagagggagcagagtttacatggaacttctacgctggatattacaacaaaaacaatcttccagcacagcctacaagaacatgggtaacaaagactatcgctgaaaaagacagcgacggtgctatccattacattactcgtttagctgacaaatataaagtatcttgggacagcttctatacgcaggacggtaaaaacgtacttccattaggaacactaactgttgaggaaacaaaaagtccgtcgggttacttgttagagggtacatatatgcaggctgacggtagcgaagaacagataaaaggaatgtatctgacacagattacagaggacggcgaccttgccgtattatctggaagcaatcaataccatgtttctgataaagtcattcgtggcggtgtgaaaatccagaaacgagatttagaaaccaaagacacgaaagctcaaggcggtgcgactttgaaagataccgcctttgaaatcatttccttaaatgagaatgccgtcttagttgagggcaagttatacaagaaaaatgaagtgttaaagacaatccataccgacattgagggtatcgcttctacttctgctgacctattaccttacggaaaatacagattgtctgaacaaaaaccgccagagggatatttgactgacggtgcaaagccgattgattttgaaatcacagaaaatggaaaaatcgttgatttgactgacgaagcccactctatctataaccagattaaacgtggcgatattgagggcgtaaaaattggtgcaggttcgcacaagcgtcttgcagatgttccgtttaggatcacaagcaagacgacgggcgaaagtcatgttgttgtaactgatgataacggacaattctctactgcttctgattgggcttcccacaagcacaataccaatgcaggaaaaacaagcgaggacggtgtgtggtttggtacttctgaaccagacgacagcaaaggtgcgttgctttatgatacttacatcattgaagaattacgttgtgaaagcaacaaaggtttcaaacttattccaccgtttgagattgtcatttccagaaataaggttgtggttgatttaggtacgctgactgatgaatacgaaaaagaaatcactatccatactactgctaccagcaaggacggcgaaaagactattcttgctgggaaagacgtaactatcactgatacagttaaattagacggtcttaccaaagggacaaaatatcagttgaaaggctggcagatgttaaaagaagaaaatgcagagcttatcatcaatgacaagcgtattgagaatgactacatctttacggctgacagcgaaactatggaagttaaaatcgagtttacctttgacgcttccaatcttggcggtaaacagcttgtaacttttgaggaattatacgatttaagcaatccagacgaacctatcaaagttgcggaacacaaggacattgaggacgacggacagacagttactatcaaggaagtaccagaaacacctaccccagaagaaccagagaagccaaccacaccagatacacctacgaaaacagacagtcccaaaacgggcgacaatacaaatatccttgcctttgcaattatgatgtttgtttctgctggtgggctggctggtacatactttttcaaacaccgtaagatgaagaaatcataaggcggtagctgtatgagaaaagaaaaatcacgctctccgccatagcttagataggcagactatacctattctggcttgtctgccgattacctgcaagaacacggatagtcaagggtgcgttagcatttatttaccctttactatctgggggcttgctggcactttcctaaatgccagaatacacacatcaatcaaacttaaagtaagaaacgaggtaaaataatatggaattaaaatatatcgtgccgaatgtggcacagacttttggaaacttggaatttgcaggggaaaacaaagtagaccagcaacgtatcaatgggcgttacactctcgtatcaagaagttacaacttgtattcggatattcagagagccgacgacattatcgttgtattgcctgcaaaagctggcgagaagcattttaagccagagcagaaagtaaaactgattaacccacgcattaccgcagagggttacaacgtcaaaggacgtggatttacaaactacattttaatggctgatgatatgttaccagcagaaagcaaataagggggtatttgattatgagattaacaaatggaattgtattagataacgaaaaaacttttggagtattgaaattctctgcacttcgacatgaggtgcgtgtagaaaatgaggacggaacgacaagtgatgaaattaagcgtcgtacttatgatttgaaatgtagtgtgcaggaacgcatgatacaagtgtcaatccccgctgatgttcccgtaaaggactttccttataatgcggaagtggagttaatcaatcccgtagctgatacggtggcaaatgccaactttagagggactacggttgattggtacatcaaagctgatgatattgtattgaagaacaaaggcggtcaagctggaaatccgcagaacaacgctccgcagggacagcagaaaaagtaagctgacaaactagtttttcattgtaggagatataaacaactgttataatatggatgtggaaacagttaatttagacttataaaggagaaatgtgtatgctagataaaatacctaatgcagaggaaatgactgctttggtcggacaatcattatatagtgtatggaatgaattgtgtgccttgattgatgaaaagtatgaaatggaatgtctatggaataaaggtggcaaagcatggaattatgaatataagtatcgtcgaggtggcaaaacattatgtgccttatatgctagagaaaattgtgtgggatttatgattatcttaggtaaagatgaacggttaaaattcgatacatatagagataattattcaaaagaagttcagagaatttatgatgaaacaaaaacttaccatgacggaaaatggctgatgtttgagccaacagatacaactttgtttgacgattttgttaaacttttgaggataaaaagaaaaccaaatagaaagtagtttattaccacaccattagcaaatggatagtttcttataatagcggatatatgaaaatgctgtcatgtggacataaagaaaattggaagttgtggaggtagcaaaaatgaaattaaaaaaccctatgttggtagtaactgatatagataaatcagttgagttttataaaaaggtttttggactttatgtcattatggattttggggcaaataaaactttaacaggtggattagccttacagacaagtgaaacatacaaagagtttatcggtacaagtgatatttcttttggtggtaacaattttgaagtctattttgaagaagaagattttgataaatttgctgataggctgaaagaatatgatattgaatatgtccaccctattatagaacattcatggggacagcgtgtagtccgcttttatgacccagataaacatattatcgaagttggagaaaacatgaagatagtgtgcaagcgtttcttaaatagtggaatgacaccagaacaagttgcagaacgtatggatgtacctatgaaatttataaatgcttgtatgcgataaattgaaagttaggagactaatactatgaaaggatttgaacgcaaaaatcaattattttctctttgcggattgaattgcggactatgccctatgcttttgggaaattactgtggcggttgtggcaatggtaatcaatcatgcagaattgcaaaatgtagtcttgaacatggacagattgaatattgctatgaatgcaaacaatatccatgcgaaaaatatcaacacattgatgattatgattctttcatcacgcataaacggcgaaaagcagatttagaaagagcaaaaaacataggcattgagcaatataatcttgaacagcaggaaaaaacacaaattctttcttacttactttctaactataatgacgggcgtagaaagactttcttttgtgtggcagtcaatttattagaactttcagaattacaagaagcaatgaaacaaatacaatccaatgacgaattgaccttactaccatttaaggcacaatgcttgtatgtggtggaggtgtttcagaagattgctgaaaggagaaatataaaactgaaacttttcaagaaaaagtgattttcaaatttgaaattgtaacaaagattatttatatgacgaatgggggaatacctttggaaacagtagagttaagatttcaatatactcaaagtgaatatataaaagcagaaaggcaatatttaatttctagtaaaactatacataaatatgatattgctttagtcgctgtatttttgttgctgtcagtcgtttatatgctgttctcctcttttagcgtatttagtattttaatatttggattgataattgttgtaactgcattgggaagctatttatatatcctaatgcctatactgaaattcaaacaaactgcaaaatatcatgaggaatatacgctggtattttctaaggaaaacattaaatttaaaacacaaagcattgactcagaagtgaagtgggacatttactctgcactatgggaaagccatgatttttattacttaattcaagcaccacgattatatacgttaattcccaaaagaatttttaaagacctaaacgaaaaacagctatttgaagaaattgcacaatcaagagttaaaacaacaaagcatatataatgaacataccctacaatgtaacaacttcatattcatacacacaaagcggttagtcttttaagattgactgcttttttcatacttaaattaagattggagtgattgatttatgcgaatgattttgaataaaggacaccgtatcagagccagagacaagaaccttgtctaccacttttccatagggacgcttctgtttgtatttgtggcggttctcctgctactgaatatcaaacagctcatgcgtaccgactgggaacatttcagcttattggacaatggcttgacgctttccccctacaacttcataaccatattgatagcgactggtatttgtgcattggtcgcttttctgtattaccgcttctgttatgacagtttcaaaaagctcctgcaccgtcaaaagctggcacgaatgatactggaaaacaagtggtatgaagcagataccgtacaagacagcggtttttttactgacctgcaaagcagatcaagggaaaaaatcgtctggtttccaaagatttattatcaaatggaaaacggattgcttcatattcactgtgaaatcacattaggaaaatatcaagaccagcttttgcgattagaggataagctggaaagcggtttgtactgtgagctgaccgacaagaccttgcatgacggctatattgagtacacgcttttatatgacatgatagcgaaccgtatttccattgacgaagtgaaagcagaaaacggctgtcttaggctgatgaaaaatcttgtctgggaatatgacgtactccctcacgctctgatagctggtgggactggtggcggtaagacctactttctgctgacgcttattgaagctctgctacatacgaatgctgtcctttacatcttagacccaaagaacgctgaccttgcagacttaggtacagttatgggaaatgtgtatcataccaaagaagatatgattgattgtgtcaatgccttttatgagggcatggtacaaagaagcgaagaaatgaagcaacacccagactataaaacgggcgaaaactacgcctatcttggtttaccgccctgctttcttatctttgatgaatatgtggcgttttttgaaatgctggggacaaaggaaagcgtaagtttacttagccagttaaagaaaatcgttatgttgggacgacaagctggatatttccttattgttgcctgccagcgtccagacgcaaaatatttctcggacggtatcagagataatttcaatttccgtgttggattggggcgtatcagcgaattgggttacggtatgctctttggttctgatgtgaaaaaacagtttttccagaagcgtatcaaggggcgtggctattgtgatgtgggaacaagtgtcataagtgagttttacacgcctttagtcccgaaaggacatgattttttgcagaccataggctctcttgcattcgtaaggcaggacgggacggcgacgtgcgaagcgaaaggcgacggcacggactagccgttgctggtgtggcgttagccacgccagcagatataagcccctcattatctaacagaggggcacaattacgctggaaactggttcaaaaaccttgaaaagtccgctaggaataaggattttcttagtttttagctagttgtgataatcacttgaaaatatcacaaaatcacaacaatatcacgattgggggtatgacaactgaatgatactgattttctgaacaccttgaaagcaaaacgcagtgattatggcgtatcgcagacaaggcttgcaatcatggctggtatcagccgtgaacatctaagccgtatcgaagctgggaaggtagcactgaccgaggatatgaagcacaaactactggaagcggtggaaaaattcaatcccgacgctcccatgttcctgctctttgattatgtgcgtatccgatttcccacgctggatatacagcacgttatcaaggacattctaaagctgaatatagattatatgcttcacgaagatttcgggcattacaagtacaccgagcattactatatcggggacgtgttcgtttacacttcacaagacaaggaaaaaggtgtcctgctggaactgaaaggaaaaggctgtcgtcagtttgaaagctatctgctggcacaggaaagaagctggtatgacttcctcatggacgcattagttgatggcggtgtgatgaagcgtatcgacctagctatcaacgacagaacgggcttactggatattccagaactgatagagaaatgcaagaacgaggaatgtatttctaaattccgtagcttcaagaactatggttctggggagctggtaaagcacaacgaagccaacaaggacggcatgggacatacgctttacattggttcatttaccagtgaagtgtacttctgtgtctatgaaaagaattatgaacaatcctcaaaattagggataccgattgaggaagtccccattaaaaaccgatttgagatacgtttgaaaaatgagcacgcctactatgccattagagagctgctgacccactacgacgcagagctgacggcattttctattatcaaccagtatatccgctttgccgataaggaagccaacaagcgaaaaagcgactggaaaaccaacgcccgctggtcttggttcattggcgagggacgaccgcccgtgaagctgacgacaaagccagagccttacactctgcaaaggacgctgaactggttacaaagacaggttgcaccgaccttgaaaatgctgaaacagatagacgctggcaatcagatggactatctcaagaccattgaacagcaggcaaagctgacagataagcacaagcagataatcagacagcagacggcttcggtggacgaactgatagaaaaagaaaaggagtgattgatgatgtgggaattgattaaggacttactgctggtatcacttggcatgggtatcggcgtggttctgatgtgtattatgagtgtcggaaaggaagctgaccgacacatgattgaattaaaagaaagcgaggaaaaataaatgaatttcgggcaaaatttatatacatggtttttaagcaacgcccagagcttagtgcttatggcgattgtggttattggtatctacttagggtttaaacgtgagttttcaaaacttatcggcttcttggtggttgccttagttgctgttggattggtattcaatgcaggcggtgtcaaagacgtactcttagaactattcaataagattatcggcgcatagccgtactttttcattatggtttgcggatacgcaaacatacctttcccactttgggagtgggctaaggggaaagggggtaacggaatggtacacagataaaaatacagcataatgaatttcattgcttggctcaaacatagttgatataataaagatatgaaaataataaacgaaagtttttttgataaggagtgatattgtgaaattgtgtattgttttatctccatataaggcttaatggaatagacttgtatggagtgaaatgttatccagagagccttacattttatcaaatttcaaaatgtaaaggagaatgggcatggaatataaatatacaaaaattgatttgaataaatggaatagaggtaaattgtttcaaagctacattgataatatgcgtattgttatgagcttaaccgtagatattgatgtaacaaagtttattgaattttcaaagaagcatgatttaaaattttatccagctatgatatgggctgtttcaaaggttgttaatgaacatgatgagttcaaatatagttgggataataatgggaatttaattaagtgggattatatttctccgtcctatactgaatttcataaagaagatgaaaatttcacaaagatagttacagatttttctgatagcatatttgaatttcataaacgttttatattagatagggagaagtataaaacagaacgtgcatttgtggaaaatcaatctttgaacttttttgatgtatcttgtttaccgtgggtaaaatataatcattttgatgttcatgtttttgacgagggaaaatttcttgcaccagttattacttggggcaaatatgaattagagcaagaaagatatataatgcctcttacaatgaatatacatcatgccgtagcagatggattccatttatccagattttttaatgaagtacaagaattgataaactcaatttaacagctatatacaaagcagttagtctatacgattgactgctttttttcatacctaaatttaagattggagtgattgcttgaaagatatattttcggatatgcaggcaagtatcggctgtacctacatttcagatttaccacatcataaacgtatggtgtggcaggaaatgaagcgactgaaccttgccgattatccgcagaaacaattagaagattttgcaggctatgtctttggtgtcccttacactagcatagctgaagcatgaaagaaaggacgtgaaaacctatgaatgaaatgcgtgtctgtatcgaaagccgactacacacttctgaagaaatccgttccgcatggttcacacttcccattgacgaggaagaactggaagaacagataggcgttcctatcgacagtgaagattaccatatcgttgaaaaggaactgccctttgctgatgaagtcggcgaagatgcgaccattgaaaaactgaatgacctttaccatacctttgaaagtctgcctgccgatttacaagaggactacggggagctgatgtgttactttaccagccttgacgaactgcaccagcaccgccatgatgtgatacattattcatggtgtaaaaacatggctgatgtggcaaggcatttgttggacaatgaccctgctttttctgccatcgaggaacgcctgacccgttactttgattatgaagcctacggacagtatcttgatgataacggagaatttatagaaacagaccacggtatctatgaactgccgtagaagtgaggtgtttctatggtagaggatatgcgtgtatatatcgctaatcttgggaaatacaatgaggggtatctggtcggcgactggttctcttttccgattgacgaagaagatgttgccgagcgtatcggcttgaatgaacggtacgaagaatacgccgtacatgatacggaaaactttcccattgagattggcgaatatatctcgattgaagagctcaatgaaatgtatgaaatgatatgtgagcttcccgactacatcacggacagtttggacgaatttgtatcaaattatggaagtttggaggaactgtacgaccatagggacgatatgattttatacgctggctgtgaggatatgaccgacgttgcctattacttcattgatgaattgcaggcacttggcgatattccccctagtttgcagaactatattgactatgaagcatacggcagggatttatcctttgagggaacttttattgaaacaagatacggtatgtgtgagataccgtggtaagaagctggaagatcagcgacaagcattgttgcttctgacagctttttctattggggacagtctgaaaaacggctgtccttttctattatacgaaaggagttgaaacaaaaacgtgaaaaagattaaaagctacacgggtatctggaacgtggaaaaagtcttgtatgcaatcaatgactttaacctgccctttcctgttacctttacacagattacatggtttgtgataaccgagtttatcatcattctgtttggggacttaccgcccttatccatgattgagggggcatttttaaaatacttcggtattcccgtagctcttacatggttcatgtcgcaaaagacctttgacggcaagaagccgtacagctttttgaaatcacagataacctttgccctacgaccaaagattacttatgcaggaaaagccgtgaaactggataagcaggtactacatgaagctattacggcagtaaggagtgtgagctatgttcccgattaaatatatcgacaacaaccttgtctggaacaaggacaatgaggtgttcgcctactatgagctgataccttacaattacagttttctatccgctgaacagaaattcattgtgcatgacagcttccgacagctaatcgcacaatcccgtgagggcaagatacacgctttgcagattgccacagaaagctcaagccgaagcatacaagaacagtcaaagaagctggttacgggacgactaaaagacgttgcctatcagaagatagacgaacagaccgaagcgttagtatctatgattggggacaatcaagtggactaccgcttttttcttggcttcaagctcatggtaacagaccagagcatgaacctaaagagcgtgaagcaatcggcgtttctcacattcaaggagtttatccatgaagtgaaccacacgctgatgaatgactttgtttccatgccaaatgatgaaatcaaccgctacatgaaaatggaaaagctgttggaaaataaaataagccgacgcttcaaagtaagacgcttagataaaaatgacttcggctatctgattgaacacatctacggcagggacggtgtcgcctatgaagattatgagtatagcttaccgaagaagaaactgaaaaaggaaacgctgataacgcattatgacttgatacgtccgacccgttgccttgtggaagaaagccagcgacatttacgcttggaacatgaggacagcgaaagctacgtttcctactttactgtcaatgcgattgtcggcgagcttgattttccgtccagtgaaatcttctatttccagcaacagcagtttacttttcccgttgataccagcatgaatgtagaaatcgtggaaaaccgaaaagcgttatcgacggttcgcaacaagaaaaaagagctgaaagatttagacaatcatgcataccagtctggcagtgaaaccagctcaaatgtggtagacgcattagacagtgtggacgagctggaaacggatttagaccagtccagagaaagtatgtataagctctcttatgttatccgtgtatctgctccagaccttgacgagttgaaaagacgctgtgatgaagtcaaagacttctacgacgatttgaacgtcaagctggtacgccctgctggcgatatgctggggcttcactctgaatttcttcctgccagcaagcgatacatcaacgattatgtgcagtatgtcaaaagtgattttctagctgggctgggctttggtgcgacacagcagttaggggaaaacacgggtatctatatcggctattctgtcgatacgggacgcaatgtttatctacaaccgtcccttgccagtcaaggcgtaaaagatacggttactaatgctcttgcttctgcctttgtagaaagtcttggcggtggaaaatcattctgtaacaacctgcttgtctactactctgtgctgtttggcggtcaagcggtaatcttagacccaaaatccgagcgtggcaactggaaagaaacgctcccagaaatcgcccatgaaatcaatatcgtgaaccttaccagcgacagagaaaatgcagggcttcttgacccgttcgtgattatgcagaatgtgaaagacgctgaaagtctggcaatcgacatactcacattccttacgggcatttcttcaagggacggcgagaagttccccgtacttagaaaggcagtgcgtgccgttacccagagcgaccagcgaggattgctccatgtgattgaggaattaagaaaagaagatacacctatctcttgcaatattgccgaccatatcgacagcttcacggactacgactttgcacatctgctgttctcggacggtacggtgcaaaatgcaatcagcttagacaaccagctcaatatcattcaagtagccgacttagtgctacccgataaggacacgacctttgaattactgtccgtttccatgctgattgtgattagtacctttgcgttagattttatccactcggatagaagtgttttcaagattgtagaccttgacgaagcatgggcgttcttaaatgtggcacaaggcgaaacgctctctaacaagctggttcgtgctggacgtgccatgaacgcaggcgtttattttgttacacagtcctctggcgacgtgtcaaaggaaagtctgaaaaacaatatcggtttgaaatttgcctttagaagcaccgatattaacgaaataaaacagacccttgaatttttcagcattgacaaagaggacgagaacaaccagaagcgattgcgtgatttggaaaacgggcaatgcttgcttcaagatttatacggacgtgtgggcgtggtgcagatacacccagtctttgaagaattactgcacgcctttgataccagaccgccgatacagcgaaatgaggtggagtgatgaaagaaaggataaaaagtgtgttcacaagaaaaaagatattccgctttctcaaaatggctctgtttgtcgtggcactttcccttatcctgctttcacttttgggaacggtggcacacgcaacgggacttgtggacgacactatcaacaccgagaacctttattccaaatatccgctgtcgaattatcagcttgatttctatgcagataataactgggcgtggttgccgtggaactggctggacgggattggaaaaagtgtgcaatatgggctttactgtattaccaactttgtctggacgataagactatatctaagcaatgcaacgggctatgtagtgcaggaagcctacaagctggactttatcaacgatatggcagacagtatcggaagaagcatacagacccttgcaggcgtaactcaaaatggtttttctacttcgggcttttatgtgggatttcttctgctgattatcttagtcgtaggtatctatgttgcctatacgggactgataaaacgggaaaccagtaaggcactacacgccgttatcaactttgttgtggtgttcgtattatcggcttcttttatcgcctatgctcctgactacatcaagaaagtgaatgacttttcatcagacatcagtaccgcttcactggacttgggaacaaaaatcatgcttcccgacagcgacagcaagggcaaggacagcgtggacttgataagggatagcctattttccatacaagtacaacagccgtggctactgcttcaatttggtaattcgggtatagaggaaatcggggcagaccgtgtcgaagctctcgtatcggcaagcccagaggacgaggacggcaagaccagagaggaagtcgtgaaaacagaaatcgaggacaacgacaacaacaatctgacgatactgcaggtggtaaaccgtttaggtatggtgttcttcctcttgttcttcaacttgggtatcacgatatttgtattcttgcttacgggtatgatgttgttcagccagatactttttatcattttcgctatgtttctgcctatcagctttctattaagtatgataccgagctatgagagcatggcaaaacaagccatagtccgtgtgtttaatacgattatgacaagggcaggtattacactgattgtcacggtagcctttagtatttccagtatgttctacaacatatcgacggactacccgttctttatggtggcgttcttgcagatagtgtattttgcaggtatctacatgaagctgggcgatttaatgagcatgttctctttaaacgctggcgacagtcaaagcatgggacggcgaatattccgcagaccgtatctgttcatgcgacatagggctagacgtatggaacataggcttgcaagagctgttagtgctggtggtgtcgctggtgcggtggctggtggtgtcgttgccagttcaaaatctacacgccagaatggaacaaagaacaatcgtggaaatacaagctccagcatggggcagaaagcaggttcagccgtgggagctgtccttgatacaaagaataaggtcaaggacaaggcaactgctgtcaaagaaaatatcaaagatatgccgacacagactgcctatgcggttcactctgctaaggaaaaggcgaagtccagtgtgtctgatttcaagcgtggcgtggtgcaggaaaaggaaaaccgccagtctggacgcttaaagaagcaacagctacatagacagaatatcgctgacaagcgtatggaacttcaaaaggcacaagaatcaaggcaggcaggtaagaaaacggacggatcagcgacaagcggagctacccgtccccatgaaagaccagctaccacttctaaggttaatgtagaaaaacagcaggaagtcaaacgccctgccatagcttcaaccgtgaagaatgatgaacctatcaagaaaaatgttgtcaaggaacgtccactatcttctggcgatacatcagcaaagaccgtcaatcaagaaaccacaagacagaattacaagactgaccgtgttacgaaaacaaccgttcagaagcatacacagcagaataccgagaagaacaaacgaaccgtattcaagaaaggacaaaagaagaaatgaaactaagacatatcgctattgttggcagtctgttttctatcctcttttctctcgtattattctttggggttctgattagtgccgaggacgacgacgggggcaatggttattcctctaattatgtaggtatgaacctatctgccgaagtcttgaaacatcagcctatggtagaaaagtatgccaaagaaaacggtatttccgagtatgtcaatgtgttgctggtaatcatacaagtggaaagtggcggtacagccgaggacgttatgcaaagctctgaaagtctgggactaccacccaactcactagatacggaaagctcaatcaagcaggggtgtaaatattttgcgtccctgctttcttcctgcaaaaatcaaggtatcagtgatataaatgttgtgatacagtcctataactatggcggtggctatgttggctatgtggcaggaaacggaaaaaagcatatgttcaaccttgcggaaaacttcgcaagggataagtcgggcggtcaaaaagtaacctatacgaaccctatcgccgtggcaaaaaatggtggctggcgttatggctatggaaatatgttctatgtggagcttgtgaaccagtaccttgttgtcaatcaagtatcgggcgagctggcacaaaaggttatgaatgaagccttaaaatatcaaggttggaagtatgtatatggtggcagtaacccgaacacttcttttgattgttcgggactggtacagtggtgctacaacaaagctggcgtatctttaccgagaaccgcacaaaatcagtatgacgcaacccagcatatcccactatcgcaggcaaaggcaggcgatttggtctttttccacagtacctacaatgcaggaagctatgtaacccacgtcggtatctatgtaggaaacactcagatgtatcatgcaggcgaccctatcggatatgccgatttaaacaatgcttattggcaacagtacttgatttgtgctggaagaataaaacagtagaaaggattggaaaccatgtttaaaaagaaagaaaaaccagtaaaagaaacgaaagtccgcactatgaaagtaggcacacataagaaatctgtgattgctctgtgggtggtgcttatcgccagcgtatcatttggcgtgtataagaactttaccgccattgatatgcacacggtacatgaaacggaaaccattcagttaagactaaatgacaccaacggagttgaaaattttgtgaagaacttctgtaagtcctactacacatgggacaacagcaaggaagctatcgaagcaaggacgcaggcaatcagcaactatctgacaaaggagttgcaggacttgaaccttgataccattaggacggatataccgacaagctccactgttacaaatgtactgatttgggatataaaacagtctggaacgaacgattttatcgctacctacgaagtagatcagcagataaaagagggagaacagacaagcaatgtcaaagcaacctataccgtcaaagtccatgtggataaagacggcgatatggttatcgtacagaacccaaccattgcaccagcgattgaaaaatcagactatgagccaaaggcacaagaagccgacgcaagcgtggacgcagataccgtcaatgacgctaccgcatttttggaaactttctttaagctgtatccgacagcaacagaaaaagaacttgcctactatgtggctggcaatgtgcttgaacctatcggcagggactacctctattccgaattagtcaatcctatgtttacggatgacagggataatgtgaaagtcagggttgcggtgaaattcattgataatcagacaaaggcaatgcaggtatcacagtttgagcttgtgttacataaggatagcaactggaaaattattatgtaagatattttgttggcaggctctattttcggatatagtctgccttttctatagcaaatgtgctgcactaacaagcgatttcattgtattttaagcaattaaatctttcttgacaattttatcttaaatcatatatttatggatattgactttctgcttgcaataagttataatatgactataaaactaaattagtcatataggaggcgtgtggtatgtataaagaagttggtatttcttcaaataatgttccgataacactttctatttggtatacagaaagaaatagtcctaccattgtttttttgccgggtactatgtcacaccctctcatgtatgagaattttctatgtggtttgagtgaaagaggatttaatataataggcattcactatctttcacacggaaaaagccctaaaatcaaaaaaaattatacaatggaagatttgctgcataatgtatatgacgcaacgacttacggaatagaaaattttggtgaaaacatagctgtcatgggttccagtcaaggtgggattttagctgcaatggcggcgggtagggacacaaggttaaaagccgtttttccacataatatcatgctgactacattaaaagaaactatgagcttaacaaaataccccgcatggtcacaccgttttatggggctgatacagttgggctttcgtgtaggtggaaaattgctgcctaactataaggttccaggagacgcttatttagactatgacagagtattttatagtgaacaggcaaaacaagattgcttaaatgaccctatgcttttaccctattatcctttaagatttgtcgccagcttatttaatgctgacttatcgtgcttggagaatggggctatacaatgtcctgttattttaattactgccaaaggcgatccgctttttagatttgattataccaacaaagtatttgatttaattcatgtaccgaaaaaggaattacttactttagagcttaatcgtcacatgatttttaatgaggacacggacactacaataaacgcattggaagctaccttgcataaatatcttggatagtatattgattatataatcagtaaatgttatacttttcatgacgataaaaacattttagtcataagggggttatgagtttgccacgatttacggaacaagaaaaagaaatcataaacagtaaacttttgatagagggagaaaagctgttttcattatacggcttaaaaaaagtaacagttgatgatttagcagctgctgtaaacatatcaaaaggttcattctatgctttttatcccagtaaagaacatctatatgtggaaatcaattttcgcttacaaaaagagttatttacaagtatagaaacaactgttaaaaagaaaaagtataagaaccatagagatttagcaaaggacgttattatgctaagtttaacgggggtgattacttcgcctattctttcacagattgatttatctttaatggactatctgcaaagaaaaatatcgtcagatatttttgaaaatcatatgtacagtgatattcgtatattggagatactggaaggtttaggggttgtatttttggttccgcatacggttatcataaaatccctgtattctgttttatcctgtttggaacaattcaaagaggacgaagaattgaatatggtacaaaatcttttagtgaatggtattattcagcaagtagtagcagagtaataattttgtttggttatttgacaggcaagtggccaaacaaattttttacagtttatatgactatatatctataaacgtcataaagttaaaggaggaaagaataatgattgatgtaaaaaaactgtattttagttatactgacaaaccgtttgttgagaatgtaagtttccatgttgggagaggagaaattttcggttttttaggaccctctggtgctggaaaatcaactattcaaaaaattttaactgggcttaatacaagttataaaggcagcgtaaaagttgcaggtacagaaataagggagcatacaaaccggttttatgaaaatattggagtagactttgaattttcaacctgctacgagaaattcacagcacgacaaaatctcgcctattttgcttctctatatgacaagcaacctcggtctattgatgaattattgcatatggtaggcttagaaaatgatggggacaaaaaagttgctgacttttccaaaggtatgcgttctcgcttgaatttcattaaagcgttagtacatgaccctgatatattattccttgatgaacctacaagcggtcttgaccctacaaataatcgtttaatgaaagatattattcttgcggaaaagaaacgcggaaaaacgattatcattactactcacaatatgtatgacgcaacagagctatgtgaccaagtagcctttattgttgccggaaaagtcagtgcattggatagtccacataatttgattatgtcaaggggagctgccaaaatacactatacctactatgataaaggcgagaaaaccggagaatgtctgcttgatagaaccacagaagataagttgttaaaaagtttaatttccgaaaaccgtctgctttctattcatagtagtgagcctacattaaatgatatttttgttgatattacagggaggacacttcaatgagattgggacgtttaatttgtggtgatatacatttccaatggaaatatggtttctattttatctactttatattaacagttttatatgtgtgtgggattgccgctttgacgggacattggaaaacggatattgcttctatcatgatatactctgacccggcagctatgggattgttttttatgggggcgattgtccttttagaaaaaagccaaaaggtattaaatgctatggtagtatcgcctgtaaaagtatcggagtatatactttcaaaaaccatcgcattgattgctatttctacaatcattgcggtgatattgggatttgtttccggcagcaatcatttacttggtatcgcagttggtacagctttgacatcagcaatctttactatgcttggcattatcgcggctacaaaaatttcaaacttgaaccaatttctcattgtgattatgccgatagaaattgtttgctttgttccacctatcgttggtctgtttgtaaagttaccagatatattccgcttttttccgttcacagcttgcatgaacctcataactggaaaaagcattttactatcgtttgatatggtacttgtaattgctacgttgattatcctctacatagttgcgcgacatacagttaagcatatgtggagaagtttgggaggtgtaaagctatgaaaaggatattatccagtaccatacaggtatttaagcaaatcaagagcgaccctatgatgtttgcagcttgttttacgccttttgtcatgggagctttgattaaattcggtattccctttcttgatggaataacagatttttctttgcaaacatactatccgatctttgatttattactttctatcatggctcctgtattgctctgctttgcatttgcaatgattacattagaggaaatcgacgataaagtgtcacggtacttttcgattacccctcttggtaagtcggggtatctctttacaaggttgggagtaccctcaattatttcggcggtcatcgcttttattgtactgttgcttttttcattagaaaagttgtccattggaatgacaatatgtttggcgcttctcggctcagtacaggcaattattgtttcgcttatgattataacattatcaagcaataaattagagggtatggcagttacaaaactagctgcacttacattactcggaataccagctcccttttttattgatagttactaccagttcgcggttggcttccttccatcattttgggtagcgaaagccatgcagaatgaagcggttctttatttctccataggattgatggtagctttggtctggtactacttccttataaaacgtctgtttaggaagctggcaggataagaaggcatattatggaaaaaggtagacttctgcaaaacgaaaatataaataaggctattcaggtttccaaaatcacactaatcatcaacctgggtttatcgctacttaaatttgctgccggatatataggaaagtcaagtgccatgctgtcggacgctgtacactcggcttctgatgtattaagcacaatcgttgtgatggttggaattaaaatatcagaaaaacagcctgataaagaacatccttatgggcatgaacgtatggaatgtgtggcttccattattctctctgttgcattggctataacgggtgctggaataggatattcaggtatcaagaaaatcttttcaggacagtacaatacgctttctgtctctagtggaatcgcacttacggcggcagtcttatccattgttataaaagagtggatgtactggtatacaagaagtgctgcaaagcatacaaattctgacgcacttatggctgacgcatggcatcaccgctctgatgcactctcgtcggttggttccttaattggcattttaggagcacgtttaggctatgctattctcgaccctattgcaagcattgtgatttgcggttgtatcttaaaagctgctttggacattttcaaagaaagcattaacaaaatggtagaccatagttgtgacaatgctactgaaacgaagattagggaagttgtgcttcagcagcaaggggttgatggtattgatgaattaaaaacccgcatgtttggagcgaaaatgtatgtagatattgaaatattagctgatggtaatttagctctttatgacgctcatagaattgctgagggagtccatcaaacgattgaaaacaactttccacaatgtaaacattgtatggtacatgttaatacgaatgaacttccctattctccataggacagggaagatgatttaagactattgaaagggaaaggaggggaagtaggttatggaacaatactggtggattatcattgttatggttttgattgtcgttggcttacttaaaattgtaattatgaagaagtataaccaaaggagaaattctaacaatcgttcaaaaaatagcgaggatgacaagatgtattaagagcaattatccgatggtatgagatatatacctatgaaatttgaacgataaatcccagtttgtaaaagtcaataaatccaaagataaatttgtatttgaaaggagttttgaagaatgaaaaaatatgagtatgtagaaattaattataatgcgaaaggagttgtattcctttgtactgataaacacaaagaaattattgacagttatgcaaaaacggggtatcactacgcagggtttgtacccacagaaattgacgcaaaaggctgtatgcgaaagatagatttaatttttgaaaaagaagattaacttattttagggagttggttctaatgataggacttaaaagacgagatatgaattatattatgaaagttggtgctaaagctcaaggtgtttctgtatctgaatttagggctatgctacaagataccatagacaaaactatggaaagtacagacccagacgtgcaggcaaattttaaacgatactttggaaataagcggccaacaccagaggaatatatttatacgattaccaaaaagacaaaggttaaggtttaaatgttgtaaagggggcttgccgtatgaaacgctttaaatacaattcagtatattcaagcccaatttaacagcatactatttacaattaaatacgctataccagtagctcgtacaaaatttatattttgtgcgggcttttttaatacccgaaaagttttttaattattttcatttttttggaagcaaatcacaccttgctgtacagatatggtgcggaaagagggataaacacttttcaattcatagctggaaaggaggtgagattatgaaaccgtctgacttccaaaaaacaattcagtgtcagtttgaatgtaagctgaaaaaagttgtcaaaggtattatctggaactaccgcaaagaattaagacgaagaaaaaacaaggaaatatcttttagcgaattaccagacattacggtagaaagtctggcaacatgggacgactacgaaacaaactacacaatttttaatgtgtgtggcatagatattaaagtccttgatgatgaacttgcagaagctctcaaacagctacccgaaaaaaacgtaacaatgtattgatgtattacttcttggaaatgagtgatacagagattgcagatattatgaattataccagagaggctgtgttcaaacacagacaccgtgcactagaaactatgaaagagatactaaatgaaaagacaagacagtaaaggacgcaatttgcgtcttggagagagccagagaaaagacggaagatacgtttataaatataccgatatattcgggaagccacagtttgtatattcttggaagcttgtacccacagacaagacacctgctggaaaacgtgatgatatatcgttgagggaaaaagaaaagcagataaaaaaagaccttgacgacggtatcgacacggtgggcggtaaaatgacagtctgccagctttacgaaaaaaagaacaatcaaagaaagaacatcaagagaaacacggaattaggacgacagtatcttgtgaacgcactggaaaatgacccattgggtatgagggcgattgatacggtcaagcagtccgacgctaaagaatgggctatcagaatgaatggcaaaggttattcttacaagacgatagataactataagcgttccctaaaggcttcattctatatggcgatacaagacgactgtatcagaaaaaatccttttaattccaagttgagtgatgttctggaagatgatacggaagcaaaggttatcctgacaccagagcaggaagaaaaactccttgcctttatggaaacagataatgtttacagcaagtatcgtgatgaagttattcttctgctggaaacgggacttcgtatctctgaattatgcggactgacaacacacattgatatgcttaaccgtgtgattaacatagaccaccagctattgcgtgatacagaggtgggctactatatttccaaagctaagacaaaaaacggtaagcgagagcttccattaacagaaagagcatatcaagcactcaagcgaattttaaagaaccgaggaaaagcacaaccgcttgttgttggtggttatagcaatttcttattcttgaaccgtgagggattgccaaaggtagcaggaaattatgaaagtatggtgcgtgggttgattaagaagtacaacaagacccataaggacaagttaccaaacatcacgccccattcattcagacatacttactgtacgaacatggcaaataagggaatgaacccaaacaccctgcaatacatcatgggacacgcaaacataaccatgacattagggtattatgctcacggtactttccagtctgcaaaggcagagttagaaaggctggcttcttaatatcgaaaatgtatcttactacttatttactacttttggttgcattttcatgctggtaaatgccagcttatgcaaggtatcttccaaaaagaaaatgcccatacagcccgaaaatgcgggatatatcggcatctaccaacttatgaaaagataatcagaaatttagtaagtttttataataaaaaaataagaggctgtccaaaaatagagataagccttttttcataatcggaattataaaaatacacttgatttcatatgaaaaagagtgtctcataaactaaaaagtttactttgagacactaccttttttattcttatttatactttgtagacatattataatatgcgtttcactggtatctgaacttctgtcaaccagtcttcttcactctctttattccatataccatctatataagattctctaggatttccaaccactttatatttattgtcctctatccatttaaatgcatctgcataagtttttcctaatgttgaatatggaccattgtgtaatatacaaactgcattttcaactgcatctaattctttaaattttaatatatccgtatcttcctttaaatcatttatagcttgacacatttcaacatccatatcagtctctctatattcaccatcatgatatatattaaaacaataatcaggaactgcacatgtacaccctgttttcatcatttcttcagccattacatttggaaatagattaaaaagttcatcatatccctttaacacttttctcatagaagcaactttaacttttggtaaagacttaataattacatcattcatattgacttctcctttcaaattcataaggtaattacgtagtttaattattttatattcttcacttttaattacatccaacatttctttttctttattcattaaaatattttcaacttcttcaggattttctacagctttttttatctcagctaatgataaacccatttgttttaaagttattatctgatgtaatttaggtaattgctctgttgtataatacctatattttgtaaattcatctacatattctggttttaacaaccctatatcttcataataccttaatgtctttgtagttattttatttattttagaaaacattcctatagaaaacatctcatcacctgcgcattagatttgattaatttaagtttaaactttccccttaggttaaagtcaatacaaaataaattataattgtattaattcttcaattctatctccactcaataccaaaatatcccctgtttttataatggttgaacctttaggtattaaaacctgttcctttctttttatcataactattaatatatcgtctggtatattagaatctattatactcttattagcccatttattaccctcatcaacatttacttcgataagtttagagctaatttccccatcataatcattaaatgtttttaatacaggtgtattatcatcaactaaatccaactttctggctacagttggtatcaatgaaccttgtattcctactgaaagcaacgctataaaaaatattatatggaatatgtcattctctatggctactccttgagtaacagcataaattgcaaaaactactgaagccgcacctctaagacctacccacgatatgaataatttttctttatttgagaatttaaattttgctagaactataaatgttgctaatggtcttgcaataactatcatgaatatagatatggccattgctataccaaatacatttggtaacttagaagggaaagataacaatcctaacataaagaataacattatttgcataatccatgaaattccatcaaagaaatgaaccaaactttttttaagaggtatcctactatttcctataataatacctgaaatgtaaacacttaaatatccatttcctccaagatactcgctaaatgcataagaaagtattgcaatagctgttataaatatagtataaaatccttctatctcgaagtttgaatgccttaaaatataaacagataattttgctagtataaatcctatagctaacccaaaagctatttgttttattaccattggtgcaataagttctaccccagaattattcatcaatgtcaaaagaattagtgtcaacatatacgctattgggtcattacttccactttcaacttctaataatgatgcaagtgaaccccttaagtttagtttttgtgaacgcaacacagcaaacacagatgcagcatctgttgaagctgcaattgccccaattaataaaccttcaagtaaactagttcctattaccatgtggcaaaacatacctgtaaccccagacgtaattattacacccagtgaagacattaatatagaaggtatagcaacaggtttagccatattccagtttgttccaaaccctccaaaaaacattataaatattagtccaatagaacataattgttttgttaattcatagttctgaacctcccatgactaaagtcacagagttcctgcttcatagaattttgcatactaaaatatgtcttactaattctccacaggctatccccatagttcctacggttcttacataagttatttattttgaattgttattagtcttaatccttcttttaatatatttatacttgcatttatatctctatcgtgagtttcattacaactaggacaaatccattctcttatatttaagttcttcacttcctcgtttttatacccacatttattgcatatttgtgaacttgcaaagaatttacctacctttacaatttgtctaccatgccaattagccttgtattctaattggcgaataaactctgaccatgacacatcagaaattaagcgagatagtttacaattcctaatcatattctttacttgtaaatcttctatgcaaataatatcattctcttttattaatttagtagatagtttttgtagaaaatcatttctttgattagctatatgttcttgaagtcttgcaacttttaatcttgctttatttctatttaaactaccgattgtctttctcgataattctctttgtaatttagcaagtttgtttaatgacttcttaagatacttaggattttctataaattctccacaacttgagatacaaaattctttaattcctaaatctaaacctatctgattattagtattttcaaatgcttcaatgtctacatcagtacagcataatgatacataatatctaccacttggttctttagatatagtagcattaggtattctacctttaggtacttgtttatcccttatcttaaccataccaagtttaggtagttttatatgttgaccacaatacataatgtttccatttgtaaagttagttttatatgaaaatctattaattttctttgatttaaatttaggaaatcctgccttttttttaaagaatttttcatatgcattatctaaatcttttaaggcgttttgtagtgaaaatttgtcaggttctttaagccactttaattctttttttaagttagtcaaatcagaactacactgtttataagcaaaagtttctttatcgtttttataaacttctattcttttagcaagatacttattatatacaaatctacaacatccaaaagttttgttaattaactcttgctgttttttatttggatacattctaaacttataagctttttccactactgccacctcactttacttgttttttctgattattaatatattttcttatctgctcctctgtattttctgatacagtagcaacgaaataactaggattccaaagatgtctccccataatactggatgtctatatttgacatattatatgcatatcctctaccataagtaacttccatttttcatcacctattataatattaaaatatgcaattacttaaaacaagtattttgaaggttttttatatttatttttaaataacatatataagaacggtaaatcttaacttttatcatttttgaggttgtcgttcacataagttcgctactacctatgcagttctcttatgaacttcttacactttcatgtaagcacagactatatcttatccttcggcattatccgctaaggtctacccacttccactaccaatagcttgtagtgtacttccctcaagaggaatagtcgttgaagtttctcctattcggagcttacctgctgattgcccattttaaagtacttaggatttaaccttataccatctaaccaattttttctactttcgtaactttcacacttaggtttatttcatccttatgttttagtttggttagctttaggggtttccagcaattcaagtagtattggataggttctatcctatctctacatataggtttccctatatgctgactattttagctactaactcatgactaaagtcacaagtgtgcgtagctattttttaatcaaaatagattcctaccattccatcagacccaaataacatccctagtaagataaaaatcaataatattggtactccaaatttatacaataccttgctagaagttatacaaatcaatagtactaacccacttataatcattaattctgtcatagcatcaactccatttcatataaattttgtagattaatttgcatctacaattttattacttattcaaatataacatgacataaattttataagttatggtacataaagttcaacaaaaatttcacaatacattaaaatgtgagtgttatacttaaatttatatatttgttttaattatattcatttaatatttataatttgaattttttttattaatatttcattttttagttgattgtttaatatatttcattttttatagtaattttatatataactacgaaatataaagtaattagataagtaacaagaaactaacatgtaatgttaggtactctagatatgaaatcttaaaacttttaaatattgaaatatttctttatatatattattgtatatttcttataaattattgtcaatttattttttcttaaaaataaaataattgcataatttatttcaaattatgcaatttataaaatttattcccaaaactcttttactgtttcgattatctcactataaggcaataaagtcgcttcgattattgatttatttgtcttttctaaataatacttaatcatataatatccacaagcatatcctgcacaataaggcaaccctactggaaaatatccttgcattttagctatatcatcaccataaagataagatgttatattttgaaatccagtttcttttaaagcactttttattattggctttatataagtatttaatgtttcgatatctgttctactgacccaaggtcctaacatttcctctccaaacatccatgttgcaaaattttctgcaagaccttcatttatcatcatttcttctaatgttatattattattccactctataaactgaaatctaatattgtgattacattcatgtgctattaatactggtaatctattgatagtatattcattaggaaccaatgatagaaatatatatccaggaatcccaccatcaccccagtatccatcacttaatattgtataaggactatttggattcgccaataatattgaatatttatagtccttaatgtttaaatcatacccttcttttataaaagcatttatagagttttctatggtttctttgcaagtgccccaaattttatcagcagataacacatttatattctttttttgcttttcatcaatatccttaggcgataaaacccctaacatttcacttgctataattacatcatatccacctttctgtctagcaactattggaacattcatacacttccacttaaattcaaaaggcttcatcaattcatatctgtatatatcttcttttttgtttattggtgcatccattatcttcttgtatattttatctgagcgaatttctataatattcatatttaccatctcctttaagacaaagtatatacaattacgtagcgtcaatgtcaatatacattttttataatgtcaccttaatctttttattatattttatcctgtaaaccttccgtacatataacatttttttaaattaataaatttgtataatataataataaaaaattatatacttcaaggtttccctatgatacaatttactaaatcataatttagattatcaggtgcaactataaattattctatatcaaggaggatatattggtcatgctaactccatatttaatatttaatggtacttgtgaaaaagcatttaatttttatgctgaggctttcggaggaggaaaaactatatttgcgcgattagacagcaatccaaacaatcctattatgcacgcaagtgttactttcacaaaatacgaaggttgtataatgggtgcggatacagacaagcctgttgtaatttctggcatggcgatttgtgttgttctaccatctcgagaagcgatagaagaaatatctgtaaaacttgccgagggtggtacacttgtacaagaatttttaccacacccaccaccacatcaaaatgatggcgctgctgaagtacttgataggtatgggtatacttggtatttaagtacatagtaaaaataaaaaaactacatctaataatcataatatagaacagataaatttcaatttaatagtgtagtaaaaaagtcgtgtcctaagactgtcacgacttttatttgtataaaaatttaagtaaatatttttgcgaataagtgagaagtataactttaaattaatttcatatgtagtattggaaatgggttaccttgtccatctatttcagacctatcaaacactttaaatcctaagtgaatataaaatcctacagcttttttattctgctcatttacatcaacatattttacattgtatttatctatagcatattttattaattttttaccaataccatttcctctatatttatcttctataaagagcatctcaattttatctttatctattcctataaagccctttattatatcattatcttttatacaaactatattttctacttctttaagtccaatttcaactaatggtatcaaagattcaatatctttttctgttaaaaaatcatgcgttgctcttactgatgattcccagacttgcaacatttcgtcatattctgttgaatttatttgtttcatttcaagaattattccagatttcataaaatttcctccctatatcacttttaattgtataacacttttttatacaaaacttagaaaggactacgaaggttaagtatcatagtcctaattaagtttaaatattatctattatatatttttaacatttattatatactataatctagcaaatttactacaataatccatatcagtttatactaaaggtgcttctatttgagtagtaaaaaggaatttatgacaatgaccatcattaacagtagtttctccacatattaagtgaatgtgtttatcagttccaggtattctaattgctggccctgttgtaacacatatcttatggaaatggtcaaggaaatctacattatcatttattttatgaacatgatttgtacctccatttattggtatagcttcaccagtaacccctgctgcacggtggttatgtctatcctcacattcttctgctaacttaacactttctgaatattcatgaacatgtgtcatttcctcataatcattatagcacttgttgcacttattgtatttataatcatcatacacataatctctttcacatttataattttgataactcatttttatatctctccctatattatattaagaaattcttgtaaagaatctctaatgtataatatgaattaaagtcaaaaaagttcatattttgtaaaattatgtattaatttaattatttctcccagtatttagggcgtattagtgaagctggtaacttcgtactagaatctccttttgcagtatttacttgcaattgtgttaaaaatatactattttcaagattagcacctctaatatcacaatctcttaagtctgctcctattaaatttgccccactcaaatctgtacttcttaaatttgctgctattagaaatctacctcttaaatctgctcctattagatttatttttctaaggtctgctcctattaaatctatatttttacttaattttttcatatttttaagagtagaagtcttgataaatgatttaacctttcccatcacagactcactcgcttgtgataataataaattaacctttgttctatgtgatatgatatccaaattaattatctgttctgggctcatattagttatcttttcagtttcttcaattatcaaatcaatttttgatttgattgtatctgatatatttaatacagatgcttctttaagataccataacatttcatgtaattgtctcataattaaaaacacttcagacatttgatttgttaattctggtgattgcatccagtctatccccttatatgttacttgtgctactttttgacctgaaccaaaacaatcatatgcagtacaccctttaaaacctcgcttcataagactattatgtacagaacatttaaaatctggttgtaaattaatacagggttttcctgattccttatcgataggaaatccatctgaagcagaaaaataaagagctacacaacaaagtccaaaacacttcttacaatcaatctttagctcctcaaataacttattatcatatatatttttatgtatatctatcatattttttctcctcttaagctttatttttaatattatattatctataactaaatgataatcaagtcccttatttaacagttcttattcttaattataatttaaggtattatttattccaatagcatacataagtttctttatacttgtaacaatacctttatactaagacttattttaaatgtagcactgtaataataaattgtttatatactcataatgtatttgataaattgtaaatctttatagaagttgaaatttttaatgattttagaatcaagatataataataaatacaatttataaaatcagaaatatataaattaactatacaaacctaaataacatagcatttaaattcacaatttcagtataaatagtacaaagtatattaatttaaataagattggcttatttgtagaggagagaatattttggtgttcaataaaatttatatttaataaaaccataagaaaatataaagataaataaacaaacttttattacttaatagattcttatggttttatactgtactgaaaaacaataaacactacagcttatttataatattacgcttttttaacaacagaagactttagcttcatagctccaaaaccatctatcttacattctatatcatgtccatctgatgagtcatggattaaacggatatttttcacttttgttccaatctttatagatgatgaacttccttttactttaaggtctctaattactgtaacagaatctccatcatttaatacatttccatttacatctttgataatatttgaatcttcttcagctcccaatcctaatgcccactcatgagagcattctggacaaactaaaagagttccatcttcataagtatattctgaattacatttcgggcaatttggtaaattttccatctttatatgtcctccatttgttatttttaaatttcttattatataaaatttcttttgagcctttatgatatcatattatacttatatttacaaactactaatttacttaatgtttaaattctattcgtattattattaaacttgatttagctgtaatctctttcttatatttattatagttgatattattacaattttataactctatctgcctgctccgataactctaaatcatgagttacaaatacgatagttttaccattcttatttagatttttaagtatatcaaatactatgtctctattttttttatctaaattacctgtaggttcatctgcaaatattacttcacattcttttaatattactcttgctaatgctaccctttgttgttctcctccactcaattcgtatatcttttttttattgtattttctaagacctacagactcaagtgcgtaatttattttttcattatggttgatatttttttgatactttaaagcaattttcaagttattttcaacattttcattctcaattaaagcataattttgaaatagatagccataaaaatccctttgtaaaattcttatctgtttactatttggattttttatattatttattataatatcaccagaattaggtttttctaataatcccattatattaagtaaagttgtcttacctgaaccactatttcctgttatcgctacaaactcgcccttagaaatttctaggttaaatttgtctattatagatttatctttaaattttttagatatatttattaatgaaatcatctttttaatgttctccttttataattttattaaatgaactatttgagataatcttgtctaatacaatagatacaattacttctataactaatatcagaagtccaaataagataatattattacttaaatctactcttgttgatataatgcctattggaataatgtttgttaatattaatgagactattaacaacatacttctagctgtagttgaataaccaaatatttttttaatatataacttatatttatttctttcatagtagctagctactatattgtaggtaatcattaagtttgatattgctattattattatagtaaaaatttcactattcaaatatttttctagtttatttatttctaaaccatactcattataaacagcatgtaaactttggatatgcgcttctacaccttgagcttcaataatgttacttatatctgcaagggcatctaatttcttagaattaaaatatacacatctagatatataagaaagataaaaagaatcatcaatattatctatgtcaattattgctattgggtcatcaatgagattcctattgtcatccataacaagggagttataagtaaaatagctttgattattatctacatatattatattaacatttaaatctgacttctttgttttatttaactctctatttaactctttattgtacatattttctacttctattttttcaaaataaaataattctctaaactcttttttaatctcattttcatgtacttgtaactttttaggaactaataaatttatagtcttatcgtcataatcgattagattaaatatttctttgccatttgagtaaatagggttaactttaagatagtttttatttatttttatatttttaccatattgacttacttctgggtttttaccctttgaatttatttcatacatgtaacttccatcttcaagtttttcaaaattagttgaatctattaagaaagcatctttttcttctaccaaatttttatagaaacctttaatcttggcatttttaattacttcttcctttcctaaagattgttcgcctgtatctttaagagtaagattataaacattttttgctttatcccactcagatagatttcctaactgagtttgtagcatattataatttaaaatacagttatttatggataatataagaaatgatacaaatacaattttcaatgtgaaatgcattatatttacaaaaccataagatttttttccatttagagatagcacatatttagaacttctactattaaaaccaactattaatatagatatcaaaatatttatcaaaatacatataatcgaaaacatagcaaagtataagcatgctctaacacctatatttaattttaaaatatagattatatatattaataatgctgtgacagatgataaaatcataattctaaatatattttttataaccctagcaattatatctagcttagagtatccatttaatcttaaaatagaagcctctctactcacactaattgaataatgtattattgtagccaagaaacaaaggataattagtattaaatctctaattattgaaggatttaagtataaatttgagttaacatatctatcatgtaatcttgctacaaaaatacttctgtctacatttagttctcttaatattttatttattgtatcttcattttgagttgaaatatataagattcctgattctccaacttcacttattttaccaaaatccctaattaaaattgatatgtctttactcatagttgagaatttacctacttgattactattattactattattagtgtttatattactaataaattcatttgaattagtattaggaaattttcctgattttaactttatattgttattcaaacttgtatcagtcgtatatatagataatttttcattattattaaaaacatactttgatatagccacattattttcatctgcaatatctttaatccacttactataatttttatttaactttttataatctttaaacattacagatatacttgttgtatcgttatataaaatattattaatttcattatctttaactatatttagacctaataaagatactattaatagttcaattgtaaataatacatatattatctttttcaattatagctccctcctaattgtttttattctaaaagcaaaatatattttactttagttaaagtataatgctttgtaccttttctaaacaactactatattgtcacattctaaatggcaagtgtctatttcgtcacaaagataaaaataaccttaaaacagttaattttttataatcaactgttttaaggttattttttatttttagcaaacaatattttaatagtggtacaaaattagtataattcattaatatagattctagtatttttagcaatcaactaaaataatatcttatttaaaacaaaatttaatttaagttcaatataaactttacctcaactagaaaatatttcttctaacttaggaattaatgtgtggatatctcgtcaatagaaaactaattcatcctccatgttaaatttctcttatatttttaatgatttcacgaatctttttggcattttcagtaatatcctcaatagttcctttagttaataaaccaccaaatccacatacatcaactccattttctaaccatatatgtaggttttcaagattaattcctccacttgctaaaactggcatatcaggtattggtgtcttaaatacctttactagtttaggtccatagaaatctgatattgggaaagcttttataaaagtcgctcctaaacttagtgcatctactgcctcagtcaatgatgtacatcctggagcataaggaatctgatatctattgcaaatcttcgctacaccttcattgtaatttggtgcaataataaattgagctccatgtaatatagcatgacgagctgtttcactatccaaaactgttcctgctcccacacaaagtatttcaccatactttttattaagcccttgaattatttctccagcattatttagggtataactcatttctataactgttataccaccttttatacatccttcagcaatttcacatgcacggttaagattttcttctcttacaattgcaagagccccacattctgacattcttttggttatattcatctttttcatattatcacctctatactcatcaaaccactttacttattcattaattttagtcatgttttataatatatatattaattatataccagtgtaatttccctatttatattatctattctcactacttttattaagtattgtcctataattttcaactactcgtttaatttcttcaagtacttccccagttggttcagttacaggaagtcgtgcagttccaacattaattccattcaagacaatagttttcttcataacagatggaattgttccaagttttagtatacgtcgaagttcttctatactactttgagctttttgagcttcttccaaatcccctttcataaagttttcatagatagaaataccaatctctgtgaggaagtttgttgttgctgcaacagctccttgactaccagcttttagactatccagaataagtgaatctgagcctgaaaacacactaaaattctcattctgcgttacttcaatataagctttcatgttgtcaagtttaccactactatccttaattccaacaatattctttatctttgataattcacgtactgactctggttcaatattaattccagtcttacctggcatattatacattataataggtaaattaactgaattagcaatagttttgtaatgtaagattaattcctgttgtgttggtgtaacaaagtatggtgtaataatagataatgcacttgctccaatcgcttccattctcttggataaatctataacttcacgagttgaattaccacctgttccaacaaaaacaggtacacgattatttgtatgattaataacaatctttgcaaattcaactttttcatcatctgttaacacatgacattcaccattagtacccaaaataaataatccataaatccccttttcaatcaaataatcaattaatttacatgttgcttgtgaattaatattttgcttttcatcaaatggtgttatcattgcacatataatccctttatatttcataaaattatattccctctctaatagactttccaagacttcctgctggatgccatttcaaatactgctgtgtattaagacctttagcatattgtaatacaacacttaatgattgtaatactattgtttcagctaaaattgaagcacgaggagctttattaagacaatctccttcctgtttaacgcctgcgaacaggaatatatcagaaatattttttaaaaatgaactctcattaccacttacaccaattatttttgctccatttacttttagagtcttaagagttgcttttaactcttgagtttcaccactatttgatattgcaataacaacatctccttcaactacttgaccacttgacccatgtactgcttctgtaccatgcaatatatatgctgatgttccagtagatgaaagcaatgatgaaatatatcctgatacatgtcctggtttaccaataccagtcacatgtacacgtccgtgatttttttcagcttcaagaattaattcgcatgctttatttatagatgtctcatctattgaggcaataaattctgacaattcattagatatattatctaaaaattcagataatgtattttccataagatgtatcctccttgaaatcatagtaactatgactatacttttatataatttagtttaaataggttttataaattgtaaaatattatgtaatatcgaaccaactacgttgtaatcaatattagggaaagttgctccttctataccaagagtcccataaactggatatagtataactggtaaaaatgcaagtaataacccaacaacaaatgacccagcaatagcccctctccatcctcctgaagtattgccaaatattgcagctgtacctcctgagaagaaacatatgtgagcagctggaataattactacaggaaatatactaggaaatgatgccataatagcaattgctaatagaccagcagcatatgctgatataaacccaataataactgcatttggtgcatatggaaatactgttggaacatctagcgcaggacgtgaacctggaatatacttttctgaaatgattacaaatgctgcagttatttcagctaagaacatacgaacacctgacatcaatattgacatacctgccacaaatgtaaatgcctctataagcggaaaaaccaaccaatgtgttgaaccagcaatttcttgagtaaatgcttgaccagcttttaatgttgcaatatagaataagattaacataactatggatagacccattaagaagtctctgaatattgataaccacttaggaaattctatagtctctgttgtatcatctttatgttttgaaaataaacgcccaatataacctgataaaccataaccaatcatgttaaagtgaccaatagcttgttcgtcgccacctgttaattcacgcataaatggttgacagaattgaggtagtgcagcagacataaaccctaagatagttccacctattaaaatagtgattgtattatcaaatccatgtgctttcatgattaaaactaatacacaagaaaagaataaactatgacctgttgtaaagaaaatattcttaaactttgtaatacgtgcaaatactaaatttaatatgaatccaagaattaatgtacatgaaactgcaaaaccatatgtaccttgtgcaagtgctgtagctgcttctggtgaagctataacaccagtaattccaaagccatgttggaacagtttattgaaattttgaagtgctcctgtcatagcagaggcaccaataccaaatatcaaaaaaccgataagtgtttttgaagaccctgtaaatacttcaacggctgatttcttttgaagaatcaatcctatacatgcaactacgccaagcaaaacagcaggtgtactcagcaaactaataataaactccataaatattcctccttatcatattaaatttatccctcttttgaagcaaggaatttttctagtgctgtctttatttcattacggtcaacaatattgtgaatcccaattatatcaaacttcaaatttttattttttaattcttcagcaacatcaattaatgtttctacagcatctccattgaatccatttagtgaatccaatgaaccatgttctacttcaattggaaagttattttccttaataatttgttgagtctttatttttaacattaaacttgagccaactcctgctctacatgcgattaaaattttatacataattaaatcctcctttataattcgtgtgtttttataaaatcaataatttctttagcctctttagcactatctaaaaccttaaaaaactcatcttcttccaatagttcaactagctcagacatagcacgtaaatggctattattgtctattgcacttagacaaaatacatattttacagggtcgttttcgttattcccaaactcaataggactatctaaagtagcaatgcctattgcaatctcttttgacccagcttctggtctagcatgtggaagtgcaacatgttttgtaattactatgtatggtccagatgcttttgctgagttaatcatagcatctacatacccttcagttactttgttattttcaactaatacagaagctgactgtctaatagcttcctcccaattcttagcttttacctttatttttactagtgtttcattagtaatctcacttagcataggcccctctccttccttagatgtaaaattctctatctgtgtaaaataagctaatagctcacttgaaagaatactttcagaggttacatttgcatatttttttattatatccataacctcatctattttaggttgtcttaaataaatatcacctaattgaatatacacttcacgtgtaatcttatatttttcttttgtggtcataacagggcttactttaattactggtacatctgtttttaaaccctctgcgttataattagtagtaaatacgatatctacaggttcacttatattttctaatccaactgattccgacattggtataaagtgtaagtcaggaaataagtttgtaagttctgcatgtaaaatagctgaactaccaacgccatttgaacaaactattaatgctattctttttctaaaaccatcaaattcttttttatttgaaaaaagtgttgcaaagtgcattgtaagatatgctaactcttcttcctgaatttcttctccaaataatccgcaaaactctttcattgcattacttacaattctataaactaatttatattcttcttttactttttcacaaatcggattatagataggtaatttaaataaaagtctatagtaggcaggtctaaaatgagaatataattgtttaaatattttttcttggcttatatagtaaactccgcttaaatatccaaactttgtcatcattttatttacaatttttgaaattacatccttatcttctgtatcttcttcataatttcctaccgatatacctaaaatccaagcactaatatacattatattataaggctttatcttatcctcactcccatatacttctaataattccttagcaaatttatactccttcattgaactcataactgaaatattaggaatatctacattttcctgagtaactattctagttgaatacatccttgcttttagaaagataaatatatatataaattctattaatctatcttcaacaaaagtaatttcatatttttttattagctttaatataatttttttagcctcttcaaaactatctaaattatattctttaataaaaatatcaaatactcttgaacttttctcattagacaaagtttctataatgtttttaataagcactctcctaatttccatctcattgccaactatgtaatatccatttatacgattgttcttaactttaatgttcttcttttcaagctctggtatcaaatccttgaaatcaagatttacagtagacctacttacttttatagaatttataaaatgattaattgaaatatcctccatgttaataaaaagcattaaatacatatataaaagtctttctgtcttactaaaataataagtattcttagaatagtttttttctaaaatttctttaattgctttttttgtttcttttctaacgataatatctttatcagctcttaaacatataagtggtacattttttactttaagcatgtcattgattttatttattctataagtaatttgtctctttgatgaattagactcctcttgtaatccattagttgtaatcaatgtgctatttaataaaatctggagaattgatacaatttctttgtccactaccattaacccctactttcttattaagattagtcttcatattatcattggattctttcatcacctccacaatacttattttatttgagaattttatcgttttcaatttcatttaagtataacttttgttttagattgagacaaaaattaaacttatctaaaatagctactatattacacttatagattttataaataaaaaagggttccttatgtaaagaaaccaaaaaaaatttatttaaagaatcaaagcgatactaattatgcataaattaccataaataaaaggcacattaatttaaaataaaattaatgtgccttatttataattctaatatattaaatttattttttaacttgtagtttaatatcctttttcttcaattaattcatataaataaagtatttaataataaatgttccttatgactttaatattttaaaccaagaaagttaaagtttctctcatataataaattgacacttatctatttcattcttttaagtgtacaataagtcttcttctagcagtaagagtaagtacttcctctacttatcacaaactataatttttatctcattggtatatatccacgatactgtgagtatgcatccatagttgctatatcacctaagaatactgatgcgatattgaattgtggttttaaatatgggaactcctcttcttgtgcccattctggttttttaataaacgactttgtctcttcaaccacagctttataccattcctcttccccttcaaaccatagttctgatacacggtcaaaagcagttgctccataattaatcattattttactactgacaaaacgattaacatagcaacagtttgtaaagtatggcactacctcatcatagaaccatttttctccttcttctttagagataccatctggatacttaatcataaattgccaacgatagtttggtccatcttgtacagtacgtccttttcctctaaagtcttcttcccagtttattggaacaaaagcaaatataaatggtgggcatccattatctccacctactgcacgtcctgcatctccactttctgcattttcatgaacccttttattttctacatctggtatacacccttgccaacgtagaacatccataggcatatattctgtcataattctatttgccatctcaggcatatgttcatctacaagccaataatgttctgttagttgcatcttacgtgcaccaaaacgctcaccttcatttggtgtaggatatgcttgataaaaggcatatttagtacaatatggtccaaaagtgctaatactatctggaatatggtgacgatataaccagtccattaacttaggtctatattcttccttggcaagtcctacatatattaaacttctcattattttaaattcaaaacccatagccattctcctataatcaaagtatattcacatgctttcaatttccctttttcttatctttactcaaaatatatattgtaaacaaatctacacctgcacccacgtaccatactcctactgccatagctacagcaatttgaatacaaatatcttgtaaattaataatattttcacctgtcataatagttagacctatagcccaaccacaaagccatgatggtaggaaaattattttttcaaataaggatgcaattacaactgcaaaaaaacctaatatactaagtgttaaaaataattctaggttttgattgaaattcatatatcccataattaaaatggctaacactgcccataaatctccacaccaaaaaccaaacattatttttaatccatctttttgtttattaccattagttacatataatcctgcacagattagtgctacagctccagtttttattcctatataaggtgctaatactgcccataaaggaggtagtaaagcaatccccatagacagtgttaatatttcttttttctttctatccatttcctatattgtaattagtagcttccctagcttgccttatctccaatagcttaattgctatttgatttacaatcatagatactgcaaaataacttaagtataatggtataaatataacaataaatgctggagttaatccaatcttgtaatatgtaagtaccaaaaaaataactgctaaaataatttcaatttgtttaaaacttggcttttcattcatacaataagcctcctataacatctaacatcccttaaaaaagagtcttagtattttaattattatcctaatgaaactccagcttgcttttctttagttaatggctctataaaattataagatgtttttctttctttaaattcttgtgttttacgaacttctgcataatgaccttccattttcttaatatcatcaccatgtataaacttacctggtaaagtatcatgagcatgacctaattgctcttctggaaaactaaatatagtttttccacttatagtatctaactctccaactataccacatagagcacaaattgcctttttagtacctgactcaaggtagaataatctattgtggcaatgtggacatacaccttcttctccttgatatgaagctttttcaaaatcttttgctgcttcaactatatttaaaccaatttgatgaacttgaacaagccttgtatcatccattactaattcctttgcccatgggaaccaagcattatctataactttccacattggtatgagagctagcatagcatgttcacattgaactcttgtaccccagtcagaacctcctattcccataaatgatattactttatcattaagcattcttgagtctggaatttttcctcctatagcttctgcaacttttgttcctataatgttatttcctctatctgctctgggtccaaaacggtccattatagtatggaataatcctgatgccccttcttcaaaaatagggtctgaaactactataccatctgcatctttcattttgtcaagcaaccattcaaaatcatcttttaatacacacatactacctttcccggataataaagttttaacgcacgcacaacatccagtacaatgtttaatgttaatagatgacatttgaataaattctacttcagcccctgcttctttggcacctttaagtgcaactttacacattgtgtcattatttccattttttgttccaaaagaaatacctagtattttcattttcaactctccctctttagtatttatttaatcttctttcatttttaatatatagaatccatcatctaaagcatctatgatgatgtagcctctatcatcaacgataagatcttctgttactgccaagcgtggtcctgggaatcctgggaaataagattcttctggtgttttatttggatttggtggtataaaatatgctaactctttgatataatatgggtctgatacatcataaacccttagccctgcatggaaataacagcaatatactctatctcctctttgctctaaccatggcttattatccattggttcatgaagattatgtggaccaaatggccctgcttttcctaatcctgcaacattaaagttaggataagggaaatcttttggaacttcaggatatgggaattgagcaattaatgttggttttgttgggtcactaacatcaaccatatgtatattattcatagcttgaacatctgtaatgttatctggtttaaagaactggaatctttctccctcattttgaacaacgactaaatctcttcctggcaatggtaatgctgtatgagttcttgcacctgcaagtctactagaaaatgcaggcataaatggcaattcacctaagcatcttggtcttgttaaatcttcaacatctaatacaactaaaccagctcctccataaccacaatatgcttttccgtctcttacaaatggaggtccatgaagccatcctttatccataaattctgggcaatgaggtgctcctgcatcaaaagttctatttggatatccatctgcatattggtctggtctccaccatttacctatttccactggattattaggatttattatatctatgaccctataaatcagaccttcaaagccaacacaatcacttgataaatgtacatatcttccaccattgtacatgaatctatgaacacccattacatgctttaagccacaatcccaatatcctaaaaacttaggatttaaagggtcttcttttaaactgtatattctaattcctgcttcacacttaatatttgctaatttagcttggtcaacaagtgctcctggtccacttccacaactcattgctactatcattaaatcatctgctatttgaatttttggagttgttgttgtaggatactctttagggtctaacatttgaaaatgttttataaattgtggattataagggtctgtaatatcgctaatcattactccattttttttatttcctccaaaacagcatccatataaatagtatttttcatctcttttgtacagagccatttgaaacattccacaagttccatctaagttattaaaggaacaaacttcaagatttttaatatatccgttatttccgttgccttttgcataaaatttatcttccattttttctcccttcttatttaaagtattatcaattgatatactttcattttatgagacaaacttacttaaatccaatatcgttttcattggaatatataagttattcttattaataaatttataaaatctaatgtaaagatatacttaaaacatatatttttatacaaatattttctaatattctttaaaagtaaattttcttatactataataagctttaattatagataaataaggtttacaaacaatcaagtttaaataggggtgattatttgaatactaaacaattagaatattttatatctgtagcagaaaatctaagttttaccaaaacagcagaaaaattttatatttctcaaactgctgttacacagcaaataaaagctttagaagaacaaataaatgtaactctatttacaagaagtaaacgtcatgttgaactaacaccagccggaaaagtttttttatctgaggcacgtactataataaaaaatatcaatgatgctattgcaaaaacacaacaatttgcacatggtttttttggaactttgagcattggaaccttaataggatatgaaaaaaacaaacttcaacaatacttaaaagaattttctaatacataccctaatatatctatggatatttgtactaatgaaataaccgaacttttaaacttagtaaaaaataattctatggacctcgcttttgttattaatccagaaaatcaaccattaaaagattttgaatataaaactgtagaaagatattctttggtagctcttttacctcctggtcatccactttacaatgaggattctatcgatttaattgaattacaacatgataaatttatttttgtaaaagaaacaggggatgagtatggacaaaagtcaatgatacaaaatagatatcgtgaagcggggtttgtacctaatgtggtacaacgttcaaataatcttaatactattgaatcattggtatcttctaacatgggaatatccattttaccttcattttgtgttacagatacaatgatagaacgtgatattgcaatagtacctataaaagaagtagaaaatagaattgaagttgtggttgtatggaataaaaaaaatacaaatccagcattagaaaagttcatttctataatataaaattaatcaatattaactataaaaatagcattaaccatttttatatggttaatgctattttctactattttattatctaacttttaatttaatatttataatcgttaaaaataactctgtttaacaaatataagcaagtcaaaagtgtgtctaaaaaagataaaaattttattatatacaaatgtattatctcaatatatctattttttcattgttcatcagtctaagtacatgacctgtgcttactaaagaattatccccataagttgtatgagctaacaccgaactagcaaccccaaactcaactatatcttcactcttcatattttccaaatatgaatatataattcctgccacatatccatccccagcaccaactctgtcatatatttctaacttatactccctactttcaaaataaccatcatcatttgatatatatccctttataaatctattattcatatcatcaaatcttctcatagttccagctacaatatctatatcatactcttttttaatcaattctgaactagattttatatttagactatctatattaagtatcttatttatatctctataactagcaaacagcccatgacaatatggtagtattttcttataatcatttactaaatcatcataagtcctttctggatttaatgattgtctaaaattaaaatcaaagaatacttttatccccttttcataagattttctagctagttctaaagcaatctttttaactgaatctgtaagttgcatagcaataccacaaatatggactatatccatttcttctaaacatttatcaatatcataatcttgtaatttactctcacaaaatgaactatttaacctattcaaataagtcacttcagaaggtctttctccatacccattttcaagaaaatacactcctatatgattccctccatatgtgataaagtcatcttttactccaagctttcttatatttgcacttgatgctttacctacattattattaggcaactttgtcaacatataggtattgtatccaaagtttttaagtccagataatatatttaatcccgtgcctgtaattatataatttagttcattggtttgtgttaagaacttgtagtcaggtactgaaagtctcatcattatttcaccaaaagctaatatattcataaatctatcccaataattctttcattattttataaagtactcctatatcttccactttcgtatcacctgtttctttatcaattattgatgtataaacatgaggtataactttttctacaccagcatcaagtgcaatttgaactatctctttgaagttatctaagtctataccccctgttggttctaaataaaaattatgctttgcacaagcttttgcaacttctatatattcatcctttgttttaagccctcccattggaaaaaacttaattgagcttcctcccatatctttcatcatagctattgctgtttctataggaactataccatctttttcttttgaacttaatggacctgtggatatttttacaaatcctggtttaccagttggagaaactaatccatttattatactatcattttgaccaagcaatgctctagatgtagcgacacctgtaaacacttgatttatatgttgtggctgaagttctttagaaatctgagataccatatttgactgatttgggtctccagctccaagacccacagatattgcattatctatttcctttgagtattttttcatatcttcaatagctgcttctacagtgctataattctttgatagtactcctactagtacatgtccatcacaggcatcatatacttctttagcattttttatgcttcctgcaagaacatttaaacaaactctatttttataatattgtggtatacaattcatatttatcccctccattggtaaaattcaatttattaaatcattataatgtcacttactctacactctaactttctactatattttttatcctattataaatattatctaaatcacttccagttacacttcttatatcaatctcaatcttgccttcattagccttatagtctctagtgtatatagctatctctccacttctaagttcatttataatttgttgtgttgacttatttattatatcttcattaaagttaatttctccacgaagtatttctctacctgctgaatctctagttatactagcactcactccctttatagtatttatcttgtctataaatggatttagcttgtcctccatttcttttaaagttactttatcattacttatatatctctcaattgcacatgttagacctacaatattttcttttcctattttcatagctcttcctataccctttgattgaagctttacattatctatgtattttttcttacctattactaaccccgagctaggaccttctatagccttagcaccactgtatatcactaggtctgctcccaattcataatatacatttaaatcttcttctgctgctgcatctactatcaaaggtaaattatattctttagcaacttgtactgcatctaatacacttagcatactcttttgaacacaatgatgagatttaatatacataattgctgctgtattttcatttatctctcttattatatgttccttgttacacatattagcatagccggcctcaacaacttctcctcctccaagtcttatcattacttctactggaactccataatcaacattatgcccctttggaattattatttcccttttaacttgtttcttaggattatttacattgtaaactagactcatatcatcttttgctatcattgctcccacactctgtgcaatcccagcagatgcactagaaactattagtgcactttcacaccctaataaatttgctatatattcacctgttttatttacaagttcttctattataaggaaatttttacacccttcacctattgcttcaataacttccttatctactgttgatactcctagtatagtcattttgcctgaagcatttataacacgtcttacagagtatttttcaaatatactactcatacaatagtttctcccttctactcattctcttctatagagttgcctatatttaaatattctccattgactactactgctcttggctttatagacgtacttgtgattactgacttattcaaagaatcttgaagttctttttcttcattaaccacatcaaatatagttaaatcagcatcatatccttcttttattaaacctttattttttaaacttattgcatctgctgcatttttagtaactttatctattatatcttcaagtgaatagcccatatatataaacttttccattgttgtagatagattatacactggaccatttattctatttttaatatatatatctgtacttatagtgtctggaaaaattcctgcatccttagatttcattgcaatatccatactaaaactttcggttccatgacctacatcaagaattatacctctttctttagcttctatgatttcctttttaacctcattgcctctaagtattccatttggctttccattatatatatgggttaatatatctcctttttccatataatcaaatatatcctctatcgttggaggagaactcccaaagtgaaccatcataggtagattaagttcattttttattcttttagctacttttaaaggttcaacatcatttgaaattacaacacttttactcattctagctttgattccaacaacaaaatctttgtattttctaactgcatttttaagttcatattcatcaatattcatcatatttgaaagttcatcttgagatgttattccctgcttagcaatatttattaaagcatatacattggtcttatactttttagtatcttcataaaattcacctatatctaaagctcctgttgttcctgcatctactacagtagtaactccactttttattccaacctcatctggataatccttataaaggtctagtctttcgtagcagtgtgtatgtatatctatccaacccgcactaataaatttctctccatctaagtttataatttgttttgcctgatacttagaatcatctatatgattttttacttctattattttatcgtctaatatagctatatcaattatacttttatctactgtttttccacattttattaatatgtctatcttcactttactctccctctaaaataatcttaaatttactccaaggttcaataaagtctaaaagtattatttcgtcttcctttattctacccaccttattttttctttcatctgtacaatcttgaagtatcaactgtaattcccctttatactttccaaagtcatcattaccaatcactacatctcctcttttaaagatgttcttattatcatgtttagggaaattttctttagcatatttttttcttacttctgtagatcttgctacctgattagttatatctcctcttctaaagtgttgctcatttaccattattatcttttctacttcagaagttttttctttagctactacattaaatacaacttggtattcatttacttcagacattctttttaattcatcttcacttgcatatgcatttcctacaattacatcatcaatcaatcctgttgcgaataagtgcttagttgctgtagcaatatctaagtttctatgcatttcaagcgtacacagtccatcatttatattccaaggtccgattgttgcgtattttgaattgacaaaagcagcagttcttattccatactttttaaatctatttgagcatcttacaaaaaaatcatatggcaagcctgtacccctttgaggataaaaattgtgacaaccatatatattatttacatttggcttgtaagtaattatattatccaagtatgctacatcattactcatatttagttccacttttaaatcatatggattgaaagaaatcatagcttctttacttccatcatatccatagtcaagccttattccactagcatttaactcactaaagaatgttaaatcatcataagatatttgtaatatatcaaatatgtttggagctatatcaaggattacttcaaatcctaattctcttgcataggttataatctctttaaaatgttttttaacttcttccttaggtcttgtaattgaaagcatgcacataaatattcttttaaatccgtattttgaaaccatttttatatatgccttatcatcttccatgttactatgctctggatatactgatattcctaatcttctttccatctttctcctcctcaaattacattatttaaaatatataaaattaaaggcaaaggtcattcctcctaccttcacccttaataacttataagctttttctatattttatatagtacaaaacctctatatctatgtatttttataaattttcactcatttcttcttgttctctttgtaattgttgtttttcaaaaactttgaagaatggataataaacagcaaatgatatcacaaagttgattaatactaagatacctgctagtatactccagttagtactcattactgctgctattggtgctggcattgcaaatggtaatcttgctaccatcataggtataacccctgtaatagtaagaacatatgatagaattgtcattattataggtccaattataaatggtatccctagtattggattcataactattggtgctccaaatattataggttcatttatgttgaataaccctggtaaaaatcctaatctacctaaactttttagatattgtgacttagaaaacataaacattacaactaatgcaagagtagcccctgctccccctatccatacataccactgtaaaaattgttctgtaaatatgtttggcattgcatgagctgatactccttctgtgaatgcagttatattttctgctatagacatgtcccatataggtcttattactggccccattatagctggaccatgtatcccaagtacccagaataaagttattaggaatactgtcagtagcccaccacctaaactatttcctgataagaatccttttaaaggtgataacatagcgcttagtgcaacacttatatcaaatcctaaaatatgtcttattacccagaataacattaaaattactgctgtcggtaataatgcagtaaatgaatttgaaacctctactggaactcctgctggcatcttaattgtaatattcttttccttcataaaacgatatatttcaactgtaattaatgatgttacgatagctccaaataatgatggcgaattaagttttgccatatccatccatctaccagcttctataactccacctactggttcaactacttgagttggaactattgtagaaactaaaaatgccataactgcaagcataccaacacctgttgtatctaaatcgtagcttttagcaagtgatgatgctatcccaaaagtagcatatagagataaaaatcctacagtatatctaaatggtatatctaatgttgctttaaatggagctataaaatccatataagcatcaataggtatgtttaataatattgtgaaaaatgaccccactattgttagtggtaatgttgctattatacctgctcttacagctctcatatgtctctgattacttatcttcgctgctacaggcataatcttgcgctctaaaaaacttgcgaatttttccatagttatccccctgtattattgatattatcctttatttataatgcaataacgatttcataacataaactaatttttatgtaattgataatatcacttatttattaaaaatattataacattataatgtttggttgtaaacattataatgttataatatttttcgtttttacaactaaacaaaaatcctgagcatattatcatttcaataaactcaggattcttattatatttcgtatttaattacgtagttttgtacttctgtattatatcttgcaaatgatagctcaactatattatcattctcatcataggtctttctttttcttcctaataatatgtctttagctagatttagagcctttgatacctctagttctgattcttctataaaaaattcatcttcaaatctagttatatttatatttctcctatataagtacatatataaagaactttcattattaaaactttcaacagttagattttcatcaaaaggaatataatgagtaaaaaatatatatggcttactatctaagtaatacattctagtaatcttgctacatttttctccaaatatactaaatacttgtgaatttgtatcatttattattttttcaattgaaatagtctttttagataacttatgacctttagataaaagtatacttgaaaaagactctgcttttgatagcttattaaaaagactattacttattacttttgtcccttttccactttttttctctacatacccttctgattctaatatctcaatagcttttctaatagtaattttactgactccaaattcttgctctaattctctttctgttggaatattttcatcaattttatattcgttatttaatattttttgctttaatatatctacaacttgtatatataatggttgatttcttaacatgattcacctcttaaattatatgttataatattataacatataatcttatattattaataataaatatttattaactttaaactaaatataaaaagagtcctcaaaataatcctaatgtattactcactaaatattgaatcaataatctaacaattagtgtgctacacataatgtatcttttaagaactctcttaatttattctctttaatttttatttatcttgtaatttcaaatgtaaatcaacgatttcttcagctaactgttgaaaattcataccattcattaggtggtcctgtgcatgtataagtatgacacttatttcagtcctgtttccactagcttcgttttgtattaattctgtttgatatctatgtgctttatttataacttccttagactcttttaataattcttttgctttttctatatttccattcttagcctcttttattgcttcaaaagctaaccctttaccttcacctgcataacctattatattaaaagatatttctataatcttttcatccatcctttgattctcccaatttatatattaaaaatacattataatttatattacttagtgttgttaagttctatcgctctatttaaaacagcttctccattaactgttccatagtgcatcatatttataacctctactggtatattatatggcttagcaatttcttgagccttaggtaatacatatctaacttgtggtcctagtaataatacatcacatttttctatttcattttgtatagttgattctggtattgcccaaatttgcgactctataccattttctttagctgcactttccattttagtaactaataaacttgtagacattcctgctgaacaggccaacattatttttatcatatattttcctccaaatttttattaacaactatataaacattataatgttataatattttatttaattctaccttaaatgcaatatactttcaatacttttttgttattttaatattattaagtgtcaaattagcaaaaaccgtatcatttatttatgatacggttctccattatttatcctataagccctataaatctgttctaacaatatcaatctcatcatctgatgaggaaaagtcatcttagaaaaggataacctataatcagcccttcctaaaacctcatcagaaagccctaaagaacctcctattataaaacagagactactattacctctaactgctaaatcactcatagtcttagcaagttcttcagaggataaacccttaccatcaatagccaagactataacataactattatgctttatcttccctaaaattttctttccttctttgtcttttataatttccatttccttaacactcaaattctctggagctttttcatcatccaactctataatttctaacttacaatacttagaaagcctttttttgaactcatcaatacctaattttaaatatttttctttaattttacctactactactatacttatattcatatatttctcctaaacttaattttattacaaatctatgcattactagaatttacaagctcttataaaattatatctctttttcttgatttgcatattctacaaactcttcaaaaggtattgctttgctataataatatccttgatatatttcacatcctaaaccatataacttatccctttggtctatattttcaacatactcaacaactatatcaaaatctaaattttttgaaagatttacaatagtcattataatttcactacttcttttatttgtaagtatctctttaactaatgaaccatccaatttaactatatcaaagttattattttgaagatatataagagagctatgccccatcccaaaatcatccataattaactttattcccaagttatgtatcgcattgatacgttcaataattatttgtgaacctgataatgcaatttgctctgttatttctatacctaacatattaggatttatatcattactactaatgatattttttatttgctccggtaacttagggtcatcaagttggtctggagatatatttacagagaacttaacaggatttctcaatagcttttcactcttctttaaatcaatacatgctttattaataatatactctccaagctcatctaagaacccttcttctttagccaaaattataactagtggtggataaatgaaccctcctattgaatgtttccatctaagtaatccctctgctcccacaacatttccattataattgacttgtggttgataaaaaagttctatttctcctcttttcatagcaaacttcaagtctgatgccaacatttttgaaattgaacctattttaccattatggtttagaagattaggctgttcacctgttaattcatacctttttaataagtttgttaaattttctatattattcttaaacatatatgtatatctattttgcgacatttttataaacggaatataaatcataacaccaacacataaattaaatacttgcaacaaactacctcttattgaacctgtagacatatatccacttaaaaatataggtgaggtccattctacagctgaaactgtacatggtacaatacctgtagacatagccacataacttgtaatggttaagattataggagtaattacaaaaggtacaaacataatatagttaaaaacaattggtatcccgaaaactagcatctcattgatattaaaaagagctggtattgaagcaattttagctagctttcttacatttatacgtttttcactaagaaaaattgcaattactaaacatagtaaagagccacatcctcccaataaaaccattgtatcaaaaaaggtcttagtaaaaatttctgttggtaattgattattattaactaaatttatgttaattgccatactattttcaaataaattttttgcgacggtatctaatacattactaccatgaatcccaaaaaaccacataaagtgcattaaaaaaataaacaacagagcactcataaggtttgttcccattttattaaaaacatttgaaaataaattataaaatatatcttgaaagtttgaactgccaattagacttatcattatcactctaaaaatagaaaacaaaaatactactattatgaaaggaactatagccgaaactaccatattaaagtctgcatcagccccttctgtatgaaactttacacttgtaacaaaagattctgtaagttttacaaacaatacagaagatgtcatagaaacaattatagatgtaaataaccactttgtcttaaatatttctatataagaattaagctcattaccatgtgaaaatactaaaaaagagcacattgcaactataggaacaagtactgtatacttgctcccatatatttttccataactatagcttattgttaataatattattaatgaaataattcctaaagtagaatcatttataaagttaagaatatttgtaacctctccattaaacaagcctgataaatattcttgataagcctttattggaagattcaaaattacaagagccgttgaaccagtcataatagcaggtattgctaaaatcataccctgctttatagagtataaaattttattatcctcaacattttcaaaatttctctttagcaaagttattcacctctacttcatctcataaacattagaaacatcatttcgtgatagtacatctagttttacatcttgtccaactactatatcatttgatgctaatactccttttgaagtctcatatgctaactcaggaaaattattttctttacttaaatgtgctaataatatagattctgtaccttcattaataagttcaacgcagaaattagctgcatcttcattggataaatgaccagtacttgacattactcttttctttaaagcatatgtatatgaacccatcataagcatattagggtcataatttgattccaatactactaatttagatttatatagatgtttttttatattttgagttatacatcctatatcagtagctatagacattttttcatcactctctgtataaaaattatatccaactggatcagacgcatcatgttctattgaaaaaggtctcactatgatatcacctaatgagtaggttttatcattttcaaatactttcatatttttatctttgatgtcacctaatttgtccttcatagaacaccatgtttttatattagcaaatactggtatatcgaactttctggataatatacctgctccttttatatggtcaacatgctcatgtgttataaatattccttttaatttatctgcatctacaccaatgtctttaagacctgtagttattctcttgccacttaatcctgcatctactagtatattagtatttttataccctatatagtggcaattcccactactaccactccctactgaacaatactttagcattccttcacctctttttctgccttataaattatattataccaaaaaaacagagtattaaataaaatttaatactctgcacaaaatttacttacattcactatttacttacattcacttataatcttatttatatctacacctttactattccatagttccacaaaagctcttccattagcatttttatgcttatatttattatagtattcatttaaagtctcaaagaatactttatctccaacttcttttcttatttcattaaatgctattgcgccttttgtataaacattcaagctgtattcagtagaatttttatactcatttgctggcttaaatatattttcactcaaataactttttgtctgtatctccatagtttttataagcttgtttgccatatctttaccatacttttgttcaaaataaactattgtagaatattcagtaagtgcttcatctaaccagggttcacttatttcatcatttccaacagcagaataccaccattgatgtgctgtctcatgggcaataacatattctagtaaaaattcatttttttcattatataaactttggtctatcataacaagcatagggtattccatcccccctataaaaaagtcacttgctacaacagaaaattctttgtaaggatactttccaaataattcactaaatatatttattgaatcttttgccacttcagttgcttttttagaaagctttttatttaaattatatgtattgatagctactccctttgaatctactttgtttacatcaaatttactacttagtataaatgcaaaatctctaacgttttcagcttctatttcatatagcattttcttattatcatgtttatcatcaataagttttcctgtatgagcaattttatatttatttggaatcaatagtttcacatgaaaatcgctagtctcactataaaatgggtcgccaatagtttcataactctttaaattccatcccctttcatcatttacacaagctataggaaaccaattagtaacatttatagtattttctccatatccaaatcttccaattgaatttggtatttttacgttatattttatatctaatgacattctttcatttggttttaactctttccctaattctatttctaatatgtcatttttgtctcctttaattttatactccattttactattattatttaatatattctttatatctatatatccttcgttaaatccattaggataagcccttgtcatttcacttttttcaaaaggagcaaaatctttcttggaaaaagcattcggatatatatggaaatatattttatctatgtttgattttgtattatttatgtagtcaacattctgattgcacattaacctcttagtctcatcatcaaatataacatccatattatactgatttatttttgaattagttttttctttgtatgtttctaaactgtcatccttttctataaagcaacctattattaataccataaatagaatcgctactgataatgttcttcttactttttggttgaattttataaccaaaatatctcctccttttcaaaatgaatacttttagaaaatatttacatgctaatcttgtgaccttttatttgtttacagacaaatataatataaaaaatgatataatttaatctgaggtgataaaatgttttttaaagaaagcaatgaaatagatttaggtgaaatcactattcccaatatctttatagatatatttatgccaatggcggacgggttatacgtaaaagtttatcttttaggatatagacaagcatgtgatattacttctaatcctaagttcgacaataattcaatagccaaaaacctaaatataccattgtctgatgtgttatctgcttggaaattctgggaagaaaagaagattataaaaatacatgacaatggagaatatgataattttaattattcaatagaatttttagatttaaaaaatttctatattgagaatatattaagcaataattcatctataaaatctaatacagataaggttgtatctacttctgaaaatccaagtattagaaaaatgtttaattctataaataaaatagttgggcgatatctcgacccaagtgaaaagatgagtattatggatataatgaataaatacaatatgagccccgatatgatactttgcgcatatgaatacgtcaaagataaaactggtacatcaaagccagttaaatacattgaaggcattattagaaattggtatgattcaaatttatatacgccaaaagatgttgaagaaagctttttggtaagaagtgaacgatatattttatataaaacgattttcaatgaattgggattttcaagacaaccatcaaaatcagaaaaagaacttatggacacctggtttgataaatttaatatggatatagatttgataataaatgcatgttctaagtctaagaatatttcaaacccaagtatatcttatataaatggtataattaaaaattggaatgaaaaaaatataaaaaatttaaatgatttaaagcaaaaagaggaagaacgtatagttaaggagaatattaataagaagcagattaatactactcaaaacaacaatacttacaaaaaaactaagtttcataatttcaacgaaacattcactcagtatacctctgatgagctcgatgagattattaaaaaaagtcaaaaagaaaagtttaagtaggtgattaaatgaatgaggataaaataagaaaaatacttgctaaatatgctaagagaagagatgataatgaactcttattagaacatagaaaaaatgaggtatataatagaatccctgagataaaatctatagatgatgaaatttctaaaataggtctcagtttagctaagatagtacttttaaatcccaaatctaaagatgaaattgtaaagaagactaaagagaatatagagtctttaaaagtaaagaaagaaaaacttttatctgaaagtaacatacctcttgattacttggaaataaagtttcaatgtatttcttgtaaagataaaggatttttacctaatggagaaaaatgttcttgcctcaaacaagaaattgtaaatgaagcttataaaatgtctaatttagataggattttaagtcaggaaaatttttcgaattttaacttgaatatattttctcctaagaaaggctctgatggggaaatatctcctagagaaaatatgctaaataatttaagtatctgcgaaaattttgttcatgattttaagaaggataatagtgaaaatctactgttttatggttctactggactaggaaagacctatatgtgcaattgtattgcaaaggaattgttagataaaggaaatgttgtaatctatcaaacttcttttagaattttagatattcttgaagattataaatttagaagagacacaaataaccaaataagtgaagataattataaaaacttgtttgattgtgatttattaataatagatgaccttggaactgaacttaataattcttttactagtggggaaatcttcaatattgtaaatacaagacttgttgctggtaaaaaaatcattatttcaaccaacttaacaccatctcaaataggaaatacttacactcaaagaactctctctagaatcttagataagtttaggattttagaatttactggagatgatttgagatgggaaagatttaaataaaatagcccttaaaaaacatttttttatttttaaatagagaggtaagagcaaacttgcttctctgtttaaaacttatgccacataaattaaaacatattttttatttttctatttacatatctaatgtatcttaatctaacaaatcatttacattcttagtagtctatatttattgatactataaattaaatttgctatattacataatactatgctagaatgattctaaattttatatttaaaactatcacattgcaagtaattcaaaattttgttgtatgtttaatttcatttttaatacaataaaaatgaaattaaaaaaagatacttaaaagtatcctgtaacatagaaaattatattaatttgaatttatgtactttgtggagctggtgataggaatcgaacctacaacctgctgattacaagtcagctgctctaccgttgagccacaccagcatataatctagtatttatctctaattcaaaatttggtgggactaacagggctcgaacctgtgaccccctgcttgtaaggcaggtgctctcccagctgagctatagtcccatactggtgactcgtaggggaattgaacccctgttaccgccgtgaaagggcggtgtcttaacctcttgaccaacgagccatattttggtgatctatccgcgactcgaacgcgggacaccctgattaaaagtcaggtgctctaccgactgagctaatagaccacattttttcgacttttttcgtcgtttctttcactcacaagttatattatagcgtctatacaatttttagtcaatagttttttttactttttttagaatataattaaaatcatctttagccatttattttcaacaaaattctttttaaaaaacctatatgtatctacataaattcaactttaatttcagctagaatatgtataagtagctttaacttaataaaaaatcaatgtaagtcaaatataaaagagcatctctaataactataaacattatcttgagatactcttcttcaactattttaaattatttaattgataaaatattaagcaaatatatttcttcttattatagtttgagctctatttggaccaacagaaaccatatctacacttactccaactagttcttctatttttgctacatatttctttgcattttctggaaggtcatcaaagttatctatttgagttatatcttcattccatccatctaattcttcatatacaggttcacattttgctaaatcatctaatgaagctgggaaatccgttattatcttatcgcccattttataagacgtacaaacttttatcttatcaaatccagttaatacatcaagtaacataaatgaaatactagtcaatccattaactctagctgcatacttaactataactgcatcaaaccacccacatcttcttggtctaccagtagttaccccaaattcatgtccttgttctcttatcttatctccagtttcatttatttgctctgtaacaaacggtccttctccaactcttgtagtatatgcttttactataccaacaacgtcttttatcatatttggtcctatacctgcaccaattgcaaatccaccagatgttggatgagaagatgtaacaaatggataagttcctaaatctaaatctaataaagtcccttgtgctccttcaaacaatacttttttacctgctcttactgcatcatatacaataacagacgtatctgccacatattttcttatttgttctgcatatcctagatattcgttatatatagtttcaaaatcaaataattcttcttttccatatatatttttaactattttatttttagcatctatttgagcttttaattttatagcaaatttatctttatccattaagtcacatattctaataccagatctctctgttttatccatataacaaggtccaatacctttttttgttgtacctatctttaaatcgcctctggcttcttctgacaatgcatctagttctttatgatatgggaatatgacatgtgctctatcacttatttttatattttctgtacttatattatccgttttaaacatttccaattcttctaaaaatcctttagggtcaaacactattccatttccgattatattcactgtatttggatttaaaactccagatggaattagatgtaatgcgtattttttaccttctacaactaatgtatgtcctgcattatttccaccttgccctcttactactacatctgcttgagtagcaagataatctataactttacctttaccttcatctccccattgagaaccaacaattgcaactgttttcatgtaattcacctctatattttatatactctcgaacactttacttacttattctatcaaacattcgtatttttttcaacttttttagtattctccaatatttaacatatattcttctatttttgaaaactcttctttctctattatttctttttcatattttataactttttccataaatttatccacatctaaaagtttttctaatttacatatgttaattatgtttccaaagtttgtattagtcatgtttatatgatactgattatccacattattagcataaacaacaatagactctcttaaattattgtcaattactctaaataagtttatttcatcaagtactttaattatattgggatatatatattttaagcttattttttccatattattcctcctaataattaatatttatacacagataaagcaagccaaaagcttgctttatctacttattcacacttatcaacaggctatctgtggatagtgtggatagttttttagctaaatttcaatgtttggacatatttagtgacatgtatccacatttttcctgtagaaagaaaggacgttctgtggatattcgttagattataggtctctcaacttatccccaaatctttgaacttcaccaagccaaacaagttccacagaaccagtttcaccgtgtctattttttgctattattacttctcctatatttttactctcagaatcagcatgataatattcgtccctgtataagaacataactatatctgcatcctgttctattgctccagactctcttaaatcagataacataggtctatggtctgctctttgttctggtgcacgtgataactgagatagtgcaactacaggacagtttaattcttttgctaatatttttagtgaccttgatatcttagatatctcttgttgtctgctttcattattaccttcaccttccataagttgaagataatcaataagcactaaatctagtcctttttctatttttaactttctacactttgaccttagttctgatatttttataccaggagtatcatctatgtgtattttggcatctgataatactgccatagcatctataattctaggccaatcattatcattaagtgttccagtctttattttttttaattctacactagattgtgaagataacatacgttgtactaattgttccttagacatctctaagctaaatacagctacagaggcatcaccttttaaggctgcattttgaaccaagtttaaagaaaaggcagttttacccattgctggtctagctgcaattaatattaaatcagtcctttgaagaccatttatttttttgtttaaatctttaaaaccagtagttataccagtgacatcactcttgttagtatataatttttctatcatatcataggcatccatcaaaactaagtttatagatttaaaatcatcactagttttctcctgtgatatatcaaatatactcttttcagcttgttctaaaacatcttcaatcttagttgctccactatatcctagatttattatttcattagaagcttttataagctttctaagtacagacttttcttttactatatcagcatagtattttacatttgaagtcgtcggtactatagtagaaagacttgtaatataactgattcctccaatatcattaagatgcccttgttttcttagttcttctgttaatgttatcaagtctataggctcacctttattacttaaagttatcatacattcatatattattttgtgagcctctttatagaaatcatcaggctttatagtttctgtaaccgttattatagcatctttatctagaagtatagaacccaatattgattgttctgattctacactatgaggaggaattctcgtcatatcttccatcttaatcacctctagttattactgtttttcttttacatccactcttattttagtagttactttttgatgtatttttatttctacgaaagttgaacctaaagatcttattggttcatctaataatatttttcttttatctacgtctatgtctttttgtttctttaattgctcagcaatttctttagaagttattgaaccaaataatcttccaccttctcctgcttttgaatatatttctatattaatttcttccatttgcttacctaataaaactgcttcttcatactctttttgtgcttttatttctttagatttattcttttcatttaattcttttattgctacactatctgcttgcacagccatctttttaggaaataagaaatttcttgcatatccatcacttacttctttcatttctccctttttaccagttccttttacgtcttttaataatataactttcatctattcttcctcctccaaatactcctctattattttatttaccatcttataagcttcttttagagaaacattttttaactgtgctccagctatatctatgtgtcccccgcctcctaatttttccataagtacatgtacatttatttgccctaaagacctcgcacttataaatatagtatcatctttttcacctaatacaaaggaagcttctacttctttgatatttaataactcatcagcagtttgagctattataacatttatactatctatctcagtacttgaatatgctaaacatattctattattaattattttagtactttgaattatttcagcttttattatgaaatcttttacatcagaattgaagaatttctttacctctatagtatctgctccaacttttctaaggtaagaagcagcttcaaaagtcctaacacctgttttgaatgcaaagtttttagtatctagacttatacctgctaaaagcccttcagctgtaagtttatttattgttacatcttcatccatatactgaactaactctgtaaccatttcacacgttgaggatacatatatctcatggaataaaagcactgcatcatttataaactccacacctcttctatgatggtctataactactaccttctctgatagctttaacagttcttcacattcagtataatttggtctatgagtatcaactactacaactaatgtatttttagtacagttgtcaatagcttcctcttttccaataaacagctttttatagtaattattttcatttattttatttataaatatttctatagattcatttacagattgtaaaactatgtttgcagttttgttacaggatttacatatatcataaacaccaactgctgctcccatagcatccatatcaggatatttatgccccattatataaacttggtcactttgttgtataacctctcttaaagcatgacctattaatctggattttactttggttttcttttctacagctttagattttcctccataaaacacaaatttatcttttgtttttacaacagcctgatcaccacctctaccaagtgctaaatcgagagcacccgtagcaagttttaggttctcatttaatgtatctccatctataccaattcctatacttatagtaacaggaagattatttccataatcaatatgtcttattgtatctaaaatagaaaacttctcagcttccaatttttttagctcttttttatgcattaccaagaagaatttgtcttttgaagttcttctcaatgcaccatttgaatttaattctaaagcagaaagtattttctctacttcaacattaattaaagctctcttatcttctgctgcactttttaatacttcatcatatccatctacttgtattagcatcattgcatttttttcatcatcataattttgttttacttttaaatattcagtcttgtctatccagtataatatcatcaaatatttaggatttttttcttgatcattttttataacattataaattattgtatattctttttctttatagtttatttctgtgtacatctctttattttcatttaatacttttcttaaattaagatttttaactatatcctctatatttttatcaagtaaatctttttgaccaatcatatcataaaactttccattataccaggatatatttccatcaaattctaaaatacataatggtattggaagatttattatggcttttttagttgtttcatctatatctaaagataaattttgaatatactctgtccattcatgacgtctaatattagtagttctccaattgtgaaaaaccatatatacaaaaatacagaaaaataaacaccctacatacaagttgtaataaagcaaaattatactagaaataccaataacaattatatataaatttatttctggcatatttaatttaaaggtttgtttgttactcatttctatcctcctaagtggatttatagcttcttacctttctaaagtcaattatactatctaccataccaacaaaagatattcccataaatccaaataaacataaaattatccctgaaaaaaacataattttatttggtccctgtcttatccatttctttaagaaataaatgcaaactgctataccttgaattacaaacattaaattaaaaactagctgtaaattagtcattattaattctgtatataattttgaaccaataatttgaataaataagactaataaataaagtaagaaagttgtgagtatagcatttcctggtaaataaaaatcagcaaatttaggaaatcttatattcatctttgtaatcctttttataaaaaatacactcaaataatatgtgacaaacgctgataacaacccttgtaaaaataacatcattggtagcatatttgtaaaataacttacaatctcatctggcttcattttatcaaacactttaagttcagttgcagaaaaactatttttttgaatatttacaatttctgatatcatcttagaaacttcatctaatagattcacatttaaaaatgtctttaatacaaaaaaatatacaagcattgaaagtacaaatattatggttccaccatatatcggttcgaatttattactgtcctcttgttcaaagcttctctttagcatctttcctattactatacctggtaaagaatacattatacatatatttaatgcataagaaatgtctgcaaatagaatcagtacacaaaatgtaaccaaaatagatataagagaatactttctatcagtaatagcacctataattacatatggaacagctgctaacatactaaatattcctagcattggaatataggctattactaaagcgattattatagctaaaactattatagacattgccttagatagtctaattttattattcaatttaatatcactccctattatccatatgtttttttaaattagataaatctccataccatctttcaacgctatggtcctcatctataccaatttttattttttccttgactttataatccacatctctaaaactaattcctaatctctttgctaagagatatgttatcattattatatttgctaaagtatcttgaattgcttcatctaatggttttacccctttaaacaataaattaaacaaatcacttacactcattaatatttctgttttcatccattctattatctttatgtttctcgttatctcagaacctttatctattttcacgtttacaaccctccttaatatataatattatatcataaataataatatatttaagtatataaacaaaaaaacgagctttatagctcgcctcatttagatatataaatacatataataaaaaatgagcacaaggctcatttttttagtctaatgtatatggtaaaagtgctatatttctcgctctttttatagcaactgttaattctctttgatgcttagcacaagttccagatattcttcttggtaatatctttcctctttcagttatatacttttgtaatctttgagtacttttgtaatctattttagcgtttttgtcagcacaaaattgacaaactctttttttcttacgtcttttcttattcatcatgacttttttccctcctttttaaaatggtatatcgtcatcatctatagcttgaaaaccttgtgggtctaaaccttgaggttcaaagcttggctcaaaagctggagcactctctctatatgaattttccgatttatttttactatccaaagcttgtactgatctagtacttacttttgtaaaagttctcttttcacctgattgtgtctgataattgtctactcttatagatccttgaagtgctactaatctacctttagttatgtagttagcacaaaattcagcagatttccccattacttcaacaggtataaaatcagtttctttagatccatctttttttacatagtctctatcaatggctattgtaaaggatgccactggtgttcctgtacctgggatgtatcttaattcagggtctctagtcaaccttcccactaatacaacttgattcataaaaacaccacctattttttataataaaaccagttattaagcaacaactatcatgtgtcttattacgttttcatttatctttaagtttctgtctatctctttaggaacgtctactgctgatttgaagttaactaatacatagaaaccttctgtaaacttagctattggataagctaattttttagttccccaagtatcaactttaactatttctccgtcagttgcaacaacttccttaactttgtttagtatagcctctcttacttcttcatcagaatttggctttaccacataaactaattcataatttctcactataattcacctccctttggacttaacggctctacactcttagagcagagaaatgagactaaaatctcatacctacacattttatcatttattcttatttctgtcaatttaaattttggacaaagtttagtataaggtgaattatatacttttcaaacaaacaagggatggcaacaaccatcccttgtattatatataagttattatttttaattaagcttctacacccatagcttcttttaatacagctgctatattttttataccttctattattttttcttctggcatatttgaatagttaagtctgaaagtattttctctaccaccattagggaagaatcctcctccagcaacataagcaacattcttctctaaacattttggcattaattctttagcatttaaattacttggaagctctacccatgtaaataatccaccttctggatgagtaaatactaatccttctgggaactcttcttccatagtcttaagcattacatctctacgtttaacataaactgcttttattttgtcaacatgtgcatctaggtcatacatatccataaatttgcttacttccatttgagatatagttgatgcttgtaagtctgcaccttgttttgcaaagttaaatttagataaaatttctggagaagcacaagtccatcctaatctgtatcctgggcagaatattttagagaaagttcctaagaatattactaatccttttgtatccattgattttaaagatggtaaagtctctccttcaaatcttaaatctccatatggattatcttctattactggtatttcaaatttatttactatttccatgaattttttacgtctttcaagtggccaagttcttcctgttggattttggaagtcaggtattacgtaaatcatttttattctatcagttgtttctagtatcttttctaattcttccattatcattccatcagaatctgttggaacatctatgaatttaggttgataagatttaaatgcgtttatagctcctatgtaagatggactttcacataaaattacatcaccctcatcaataaatacttttcctgcaaaatctagaccttgttgagaaccacttgtaactaatatatcatctttgtttacattagttttgtttttatcattcattctagctgctattttttctcttaatggttcatatccttctgttgtagtatattgcatagctgatcttccattttcttcaagcactgcaactgatacttttttcatttcctcaactggaaataactctggagccggcattccaccagcaaaagatattatttgtggttgttgagtaagttttaaaagctcacgtatttctgatccttgtaatccttgcattctttttgcatatttaactgccataattaaagcacccccatgaaaatgttttcttcaattcttattataccaaaattttggatattaatatacggtatttgacattttttaagtgttaaatttttatcacttttttattagcttttttactctcttttctaaggtctctctatcaagcattattagccttgaacatttagtacattttatctttatatccattcccgttcttatgatttcaaactctttacacccacatgcatgttgcttttttaattcaacaatatcacctatttttaaatccattggcataaataattagcctcctaatctaacttctctacttcttttgaaccattttctaatttacttatacaataaattccttttatatctacattattttcaaccaaaatagtttttatcttttccatatcttcaaaagaaaatttaattgatattccacaacttgctgttatttctcttggtgttggaagagccattacttttagactattttcaccaaataacttttctgatcttatcgcatgatgtgtcgaattaaatgacactatatacatttgattcattacttaatcctttctgactatctatttgagttaatctttattattagttttatattattaaacaaacatacattatatagaaatggtatttgatgcattctttaatgtctcaactatagtatacatatttgtaactgtacctacttgtaatttgtcttttaaattataataatctaaacaagtaccacaagataaaacttctacacccatattctcaagtatttttagattttctatggtttcttcattttcagcacttaattttactcctccattaactaaaagtacatacttaggataaggtttagattctgttaatgtatatataaatccttttattaacacttttcctaattcgtcatttccaagtcccatcttatctgaagatataaatatacatgtattgtctaattcactttctttattatctacaacattttgtttatctagtatatttttaccttttctaatttctatagatataaaattctctttttcgtcaacaatatttgcttcacaacttaaagatttagcaagttttaatatattctccttagctgtttcattatcaactattgtaactacaacaccttcttctaggttatccaattctctttttgtatttataactggtttaggacaagcaagccctctcgcatctatttttatactcattgtctgattcatctccttaaaaatattcatacaatttatattttatcatagatattatcttgcttgttatagattgtttctatacccttataggtttatttaccctacattatttctaaatttttgtacataaatacacctttttgataatattctaactctttttcttttgatatatttgaatataattgacctaagtctatatataaattggccaatattctattgttgcctaaatctgatactatttttatgcatttaatcagatattcaattgcaagagttacttcattctgatttttatacatattagcatagaatctcaatgctttatattcattgaatttatttttattttttattgatgaagctaaggctatcttacaatattttctagctaaatcataatcttctttatctatatatgcttctattatcttaaataatcctgacatcatgtattcatcttcatcatttttctttatgtcatataccttttgtgaatattcaagtactctatctgtttcacctatttttctgtaaacatcacaaattgttaaatacacatttgctaatccagttttattatcctcactctcaagtatttttagtgcttttttaaagtaatctcttgattcttcatattttccaatctcaagcatattatttgcttttaacaccaaaatatcgacatcttcttttctatcatttctattatctatttcatttatcttttctatgtacttcaatgacatatttggattatctagttttatgtaacaatatgccatcttactatatagttccttgtgtatgttaacatcctcaaatttattctctgacaaaatttcctctgcaaaattaaagtggcttatagcacctttataaaagtcttcctgcatatatattttccctatgtttaaataacacttaagtatattttcactatcactattttttataaagaagtacaatgccttttcaaagttttctatagcatcattataattagattttttcaaattaatattagccattaaaaaattacatctgccatagttctccattaaatcgtatctcttacatatatctaaaacttcttttatttgatcctcagccttgtttaattcattttcttttatataaatttcgctctgtagtattaaattatcagttatcttttttgattgcatttccttggtctctaataagtattctacacttacatctagcttatcgcctagatattccaacagttcataactagtatgagatttatccctctctatatggcttatttgtgctgctgttatcctatctccagctaattcttttaatgtcatgtttttttcttttcttaattttttaatcttttctcctaagctcaaaatttccatactattcccaccttttgaagacatttttttataatataattataacttatatttattttaaaaacactacttttattttacaatattttcactgtacattaaatgatttcccataaaaatgactaaaatttagtttattttgagttttattaatttaaataaatcattttttaaatttgttactattttgtattcatatatttgctcataacgactataattatatataagaatagtttttaagagaggagaaatttttatgaaaaataagaaaataatgttagtgttaagtatattatctatatctatattcgcagttggttgtactaatgctcaaaatggaagtgatacatctaaaaaagaaactaagagcaatacaaatgttgaacaaccaaaagaagaaaacaatactgaaaaagaggttcctaataacaaagctaaacctactccaaaagaagaaactaaaactcaatcagctactatttactcttttgatgtagataagacagatttaattgaaaataaagttgatttaaataaaattgatgagaacactttatttgaagaacttcaaaaacttaaagttgttccagaatctgcaaaattaaattcatttactacaaaagacattgatggtgtaaaaactggtatattagatgttagctctgactttacaaagtcaaacttaggtagtgatgcagaaactttaatgcttgattcagttgctcgtacttacataaaaaatatgaatgttgaacaaataaaaattactgttgatggttctaattacgaaagtggtcatatagttcttgaagaaggagattacttaaagtaatttcttgaaacaattatcaaatagattagaggttcttaggagccccttttcttttttgtacaaaaaaggagatgattcaaatttttattttgaaatatcccctttttttatttctatattattaaatctcatgctatttattttttgaaatttttttcaaagcttccactgctttatctatctcatcttttgtgttgaaatatcctatactgaaccttactgcaccttgttttaaagtacctaaagtggtatgtgctagtggtgaacaatgtattcctgatctagttgctatattataatcactatctaataagaaagtaacctctccagaatccatatctcctatatttagagcgattactgatgctctttttttactatcctttggtccatatatctttatatctgatacttcctctagtttgtctatcatatattgacataattcttcttcatgttgtcttatattgttgattcctctttcaaatataaatagtataccttggttaagacctgctatacctggagtattatgagttcctgattcatacttatctgggaataactctggttgaactatttcttctgatttactacctgttccaccttcttttaatatatttaagttcaacccttctcttacatataatatacctgttccttgaggcccaaataagcatttatgacctggcattgccaacatatctatattacattcatttacgtctatatcataaacacctgctgtttgtgatgcatctactaaaaatagtatattatgttttttagctatttctccaactttttttatatctattaaagttccacatacattagatgcgtgtgttgttacaatcagtttagtattactctttattgatttttctaaatcttcataatctaaaaatccctcataatcgcattttactacagtattttcaataccccttttttccaatgcttttataggtcttattactgaattatgctccatagacgttgttattacatggtctccttcttgtaatacaccttttatcgctaaatttaaagaatctgttgcattagatgtaaatactatattcataggattacttacattgaacaacttagctatattctctcttgtatcatatatctccctagcagctctcatagcaagtttatggcctgctctacctggatttgcacaataatttttcatacaatctaaaacagcattatacactctttctggttttggatatgtagttgcagcattatctaaataaatcataacaatcttcctctctgttttatatttttgttctattcaagaagcattgatacaatactatttaaatcatcatcattatagtattctatctctattttacctttcttctttcctttagaaatattcacctttgttccaaatatatttctaagtttatcttcaacatctaaaataaatacatccttaggtttagattttttaggttcttcttgtttattttcagatatttttttagctatattttcgacttctcttacagaaagttcttcttcttctatctttttcgctatttgaagttgcaaatctttatctgcaattctcaataaagccttaccatggcctgctgtaattctaccactgtctatcatttctataacatcttgtccaagatttaaaagtcttagtgtattagttatatgaggtctactcttcccaacagcttctgatatttcttcctgagttacattgtaatgctctattaaactcttatatgctagagcctcttctattgaatttaaatcttccctctgtaagttttcaattaaggctatctccattatatctttcatatctatatctttaattatagcaggtatttgatttttatttgcaagttttgatgctctaaatcttctttctccagctattatcatatatttattattttcatccattttaaccactattggctgtaaaacaccataattttttatagagtccgacaatacttttatcttttcttcatcaaattgctttctaggttgaacttcgtttggatatattttgtctatatctatgttgactatttctttttctgaagtttctcctttaatttctggtatcaatgcactaagacctctacctaatctattacttcttttagacttattctccatactaccattcctcctcttctaaatctataaattcttctgctagctccaaataagctacagaccctctacatcttttatcataataaattacaggttttccatgacttggagcttctgcaagtcttacatttcttggaattaaagttgtatatacactacctttaaagtatttcttaacttcttcaactacttgtattgataaattagctcttccatcaaacatacttaaaacaacaccttgaatttctatatcagcatttaatcttgattttactaattttatagtctccattaattgactaacaccttctaaagcataatattcacattgtattggaattaaaacactatctacagcagttaaacaatttattgtaagcatccccagtgagggtggacaatctaaaaatatataatcatattcatctattaccgcttttatggaattttttaaaatatactctctattagttttagatgtaagctctatctctgcacctgatagttcagtagctgatggaactacatctacattctcaaattcagtacttattattgcttctttaatatgtaacccatctaacataatttcatagattgtattttctacttcgtttttattaataccatatccactagttgtatttccttgtgggtctaaatctaatactaatattttctttcccaaagttcctaagctagcacttaaatttacatttgttgtagttttcccgactccacccttttgattgaatacagctataactttgcccatgatgttcccccctttaagaattaaattaattttaaatgttgaataggtgttttttaagtataaataatgtctataaatcaatttatattacaaggcttatattacaaaaaaagattactggtaagcagtaatctctattttttagggattttcacaacaacttccatataatctcccttatctatttcattatacttagcatcaattcctgtatttgatatagcatcaaaggcctgctttatagtatttatgtaaattcttatactcatagcaccctttatattctgttttttatcaggctcttcttgaactttagtttcttctaatacatcttgtatcaatttttctgtttttttaacagtcaattcattttttatgactttgtctaacacactttgcattaaatcttcacttggtagtttaagaaatgctctagcatgtctttctgttaaattattctctattagcttcatttttatatcgtttggaagctttaatattctaagcttatttgctacagtagattgatttttgcccaatttttctgctaattgctgttgagtaaaagcatgttcttttattaagttttcataaccaattgcttcttcaatgaaatttaagtcttctcgttgcaaattttctaataacgctagaacagcagaagattcatcattcatattatttataattgctggtatggttttaagctctgctaatttagctgctcttaatcttctttctcctgcaattagttcatatttgccatcttttgctctaactgttataggttgaattataccatatacctttatagaattgctcaattcctccaatgaaacttgtgaaaatatttttcttggttgatatggatttggaactacatcttctataggtatctccataactcttttatcttccataacatacctctcttattttagatataaattatttttgttctctatatgtacatacaaatttatttctgcatctactttaataattcctttatttttgtttttttacggtaagcttaattatttcctaagaaataattaagcttaccaataataattttttcattacttttttcattacttaataggatttttagctggtctaccagcttttctagggtacttaactggtgtttccatcacctttttaaaaactaatatattatgatttaaatctacctctggtaactctacatctattttttcaatatactccaatcctaaaacatcaatagccttttgtgattcttctagctctaaattagcattcggaccttttaagcaaataaaataccctccaacttttacaaatggtacacaaaattccataagaatcggtaatccagcaacagctcttgccgtagcaacatcatatttttctctatagtcttcatttttaccaaaatcttcagctcttccatgtataaatgtaatattatctaactctagtactctactaacttcctctaaaaagtttattcttttatttaacgaatctaacaaagtaagttctaagctatctaaacatattttcaatggtattccaggaaaaccagcacctgtaccaacatctattatagacatcccattttttatatatccattctttacagctgaaatagagtctaaaaaatgttttatatacacttctttttcatcttctattccagtaagattcatctttttattccattcaactaatatctctctatagattttaaatttttctaacatactgtcattcgtatctatattaaaaccttcaatcccgtttttcagaagttctatattattcacctttgccacctctagttcttctgacttgttctaggtatataagtaaaactgatatatcagctggagaaacacccgatatacgagatgcttgccctattgaaataggttttatatcatctaatttctgtctagcctctaatctaagaccttctatagatgaataatttattttctcatccagctttttattctcaagttttttaaattggtctatttgtttcaattgtttctctatataaccttcatatttagttattattacacactgttctttaacttctcttgaaacatcttctccagcgcccttccctaattcttcaagcaattcgtaagtaacctctggtctctttaaaaattcatatagagatattccaacctttattggtgttgctcctttttcttctaacaaactatttacttcttttggtgtaactctttcattttttaatctttcaaattctttatctacagcagcctttttatttaggaacctttcatatctatcttttttaactaatcctatatcataacctttttgagttaatctcatatctgcattatcttgtcttaaatatagtcgatattctgctcttgatgtcatcattctgtaaggctcgttagttcctttagtaacaaggtcatctaataagacacctatataagcttctgaacggtctaatacaaacggctcttttccttctatctttctaactgcatttataccagccataagcccttgagctgctgcttcctcatatccagaagttccattaaattgccctgcactaaataagttctcgacaccctttatttccaaacttatttttagttgagttgggtcaacacaatcatattcaatagcatatgcaggtctcattatcttacaattttcaagtccctttatagttttgtacatatctaattgaacttcaaaaggtaaactagttgaaattccttgtatatacatttctttagtatttaacccttctggttctataaataattgatgtgaggttttatcactaaatcttactactttatcttctatagaaggacagtatcttggaccagtactttctattactccactatacatagcagacctttttaaattatccagtataactttttgagtttcttctgtagttcttgttaaataacaaggttcttgttttttttctatattttcattcataaatgagaatggagttactttttcatcgccctcttgtaaagacattacagagaagtctatactatctctatgaactcttgctggagttcccgtcttaaatcttctcattctaagaccaagctcaactaagctatctgtaagatattttgcataccccaatgcattaggaccttcataaaatgcaacttcacccatatatatctttgagttcagataaactccagtggccaatattacagctttagatttaaatgaacatcctagtttagttccaactcctattacaacatttccttcatgaagtatttctacaacttcatccatagctatatcaagatttggttcatcttctaatgtctttttcatttcttcatgatatttaaatttatctgcttgtgctcttaaagagtgtaccgctggacctttggcagtatttaacattctactttgtatatatgtcttgtctatatttaatcccatctgaccacctaaggcatctatttctttaactaattgacctttaccagtccctccaattgatggattacaaggcattaatgctatggaatccaaagacattgttattatcaaagttttatatcccattcttgcagtagccaaagcagcttcacatccagcatgtcctgctccgactactataacatcatattttcctgcttcaaactttatcatttataattcctttcttttcaaaattaatgtttcatgagaaacacttcaaattttttaaaaatctctataataaaaacaaatttacttttgtacattacttaccaatacagaaattatggaatatattatctagtaaatcctctgttactgtatcaccattaatatatccaagatagtcccatatattttttaaatcgacttctacaaagtcaaatggcatactttgttccaaagcaattaaagcatctgttgcagatttatatgctttactaagtgcatctttatgtcttgaatttgttactactaaactagaattatttttgatactacctttatataccatagactctattttatcttgcaattcttctattccttcttgttgtaaagctgatatttttattatactattattttctacatatttaagtattttttcttcttcaatctcttgtttcaaatcattcttatttaacagcactattgtttgtttatccttaagtttttctaatatctctatatcttcctctgacaactttctagatgcatctaaaaccattactatcaaatctgcactagtaaatgattctttagacttttcaacacctattttttcaacgatatcatcagtatcccttatacctgctgtgtcaacaatttttaaaggtataccttttatgtttacaaactcttctataacatctctagtagttcctggtatatcagtaactattgctctattctctcctaaaatagaattaagtagtgaagatttacctacatttggtttcccaacaattaccgtctttaagccttctctaagtatttttccactttcagctgtatcatataattttttaatctcttttttaagttcatcagttttttctttaagagtttgatatgttatatgctcaatatcttcctcaggataatctatagcaacttctacatgagctaatatctcagtgactttatctctcaattctcttatcttctttgataaagaaccctctaattgattttgagcaacttcatgagctatatcagttttggcttttataacatcaattacagcctctgcttgagataaatctattcttccatttaagaatgctcttttagtaaactcaccagcctctgctaatctaacatcttttgatagtattaattctaatatcttctttaccgaaataaatccaccatgacaattaatttctataacatcttctcctgtataggagtttggtcctttcatatatgccaataaaacttcatcaattatattttcattatccaatatatttccatatattaatgttctcttattgtattcttcaatactctttcccgacatagatttaaagatttcttctgcaaccttcaaagctctttctccacttattctaagtatacctataccaccttctccaggtgctgtagctattgctgcaattgtatcatctataaacaaatttatcacctcttaattcataattttttacatataggtttacatttaaccaatcattaatgatttaataatattaaaaaataaaaccccctaatgtttaggaggttgactttatcttttacactcaattactaatcttctatatggatcggttccttcactatatgtaattacatatttgtcattttgaagagctgaatgtattattcttctctcatatggattcatataatctaattttttagtttttcttgttttcgctacttctctagcaactttattagcatatcttattaaagattcttctcgttttgatctataattttctatatctacaagtactcttgtatgagaatctttatttattttattaagagctaatccagtcaaaaattgaatagaatctaaagtttcccctcttctaccaattaaacttgcagcttctttgccttcaatatcaaccatgattaaattatctttttgagatacattgactttggcatcaacatttgcatttttcaacattacctctataaaatttttagctacatctacttccctctcgataacaaaaatttcataagtaccatctttagcacctataaaacctaaaaaccctttacttggattttcaagtatttctacttctatatcctctgcttttaaattcaactctgctatagctttacttatagcttcctctttactcttactttttattaattttaggctttttctcattaactttttcctccttagagttagcagccagtttagcttttaaaggattcattattaagtaatattgagctattgagaataagttacttactgtccagtacaatgtaagtcctgctgggaatataaatccccaatagaaagacatacctgccattacatatgtcattactttcatagagccttgtaactgatctttgggtgtcattactttttgcatgacatatgcacttgctcctgaaaatactgctaatacataatctggtgatgttaagctttttatccataaaaacccattgtcagctgctaaaaatgcagctttgtttgcaaaaacgccatgagcaactggttctctcaaaacgctaaataatcctattaatataggaaactgtattaataaaggtaaacaaccagatagtggattaattttagcttctccatataacttaacaatttcttcattttgtttttctggcttatttttatatttttcttgtatctcttttatacgaggttgtatatcttgcattgcctttgttgacttagtctgcttaattgttaatggtaataaaataatctttacaagtatcgtaaaaagtattatagaaataccataatgattaacaaattcaaatattaccttaagaatcaatcctaagaaatttcctattatattcaatttttttatacctcctaatagttactctcttttattttagagggtcgtaacctcctggatgaaaaggatgacattttaaaagtcttcttatcgttaaatacataccttttacaaatccatattttttaaacgcctctattgaatattgtgagcaagttggataaaatctacaggtaggtccctttaagggagatatatacttttgataaaatctcactaaataaatacataaattcgataaatacctacttatttcctttaatatataaattattttattcaaagtcattaacctccatatttatagcatacaattaaatagaaatatccgttcttttaactaaattttttatagacttgtctatgtctttaaaagtagcatccttactagatacccttgctataaatactatatcatatccaggcttaattttttcatcaatatttaatctgtaggcttcttttattaatcttcttactctattcctagtaatagcttttcctactttttttgaaacagaaatacctactctactataatctgatttatttttaagtatatatattactaaatatttgtttgcaaaagatttgccgtgtttatatacttttctaaaatcagagtcttttttcaaccctttagtcctattaaagtccatagttaacctccataaacacagctatgaattgtaattatttacacaaaaaggccacctttgcagcggcccttttgtaattaatgagttaatctatttcttcctttagctcttcttctctttaacacgtttcttccgttagacgtcttcattctttttctgaaaccatgttctttacttctttgtctcttttttggttgataagttcttttactcattattttgcaccgcctttcagattttattttccgtttataaaaataataactttaccctcaaagtaaacataacacatataattataaatacttttactactgttgtcaacgagtttttgggacgcttatatcacaaaatctaccatatatatattatgtattttttttattgaaaatactagcaaaaatctatttaattttattctaaattatttttttcaattatatacacaaataaagtaattttaacatgtttatatttttatcaacaattagttaatattgtggataaattagttacaaatcattgaagtttgacatatattttgatattataaatatacttgttgataatgtgcataaatgttatcaacttattagaaattattcacagcttgtggatacttttgtgtataacttttaagattactgacaatactctagttataatcaccatttattgtatgtttatgttatttataactttatctacatattgtttatatcttttcatatttttttaataatttatactattattaatttatcaacaccattatccataaatttagttattctgtaaaatttatatatatttttgcttttctgttaataactttgtggaaaatattaattattctgttcggaggtttatattatggatatagtttctttatgggacaaaaccctacaattaataaaaggtgacttaacttcagtaagttttaataccttttttaaaaacatcgtaccattaaaaatacatcttaatgatttaatcttactggctcctagtgattttaataaagatatcttagagaatagatatttacatttaattgaagatgctattagtcaactgtcattaaaaaaatataatattaaatttgtattgagcgaaaaagaggttgctgatttaaattctgatagcacagatttaaattatagagttctttaccccaatctaaatccaaaatacacatttgatacattcgttattggtaatagcaatagatttgcacatgctgcatgcgttgcagttgcagaatctccagctaaagcttataacccactttttttgtatggaggagttggattaggtaagactcacctaatgcatgctataggtcatcatattgttagtcaaaaaaaagactcaaaagtagtttacgtttcttcagaaaaatttactaatgaacttataaactctataaaagacgataaaaacgaagaatttaggaataaatatagaaacgtagatgtattactaatcgacgatattcaatttatagcaggaaaagaaagaactcaagaagagtttttccatacattcaatactcttcatgaagcaaacaaacaaataattatatctagtgatagaccgccaaaagacatacctacactagaagataggctaagatcgagatttgaaatgggacttataactgatattcaagcacctgactttgagacaagaattgctatacttagaaaaaaggctcaactagaacgtatagatgtgccaaatgaggttatgtcatatatagcaaaaaatattaagtcaaacataagggaactagaaggtgcattaactagagtggttgcttattcttctcttagcaatagggtaatatcttttgatcttgctacagaagctttaaaagatattataacaacttctaaaaatgaagaaataaatgttcttagaataaaagaaaaagtatcttctgtattcaatttaaagatggaagattttaattctaaaaaaagaacacgttcaatagcttatccaagacagatagctatgtatttaacgcgcgagcttactgatttatcccttcctaaaataggtgaagagtttgggggtagagaccatacaacagtaattcatgctcatgacaaagtatctaaggatatagaagaaagtgaagaaattaagactaaaatagacaaaattatatcagatttgaagggataatttatacacaattgtatgtttatatctcttgaataacctgttaatactttttttgaacaaaaattattaacaaattatcaagtctaaaataacaaagatattaacatcttatacacatgttaatatctttgtatttataatgttatacatacttattaacattatcaacaacacctactactattactactatgattttaacttatttttatatataaaaagccagaggaggttatccacattgaaaataatttgtaatcaaaaaatcctagcaaatagaattggaattgctcaaaaagctattaatggaaaaacaacaatagaattattaaaaggtatacttatatctacagaagaaggtcaattaaaacttactggatatgatgctgaaataggaatagaaacttatgtacaagcagaaatcatagaaaaaggtgatgttgttgtagatgcaaggctatttggagatataattagaaaattaccagattcctttgttgagatagaaactgattcagaaaataatatttacataaattgtgtaaattcaagatttaaaattaaaggttatgcagcaaaagaatttcctaaattaccagaattaaatgaagaagatttatatagcatacctcaagaaattctaaaaaatatgattaaacaaactgtatttgctatctcacaggaccaaacaaaacctgttttaatgggagaacttttagaaattgtagatagaaacttaaatttagtagcaattgatggatatagattagctgtaaaaagttgttcagttgatagtttaactgaaaatataaaagtcataattcctggaaagacacttatagatgtaaatagtttgctttctggagaggataatgttaaagttgggtttaacgaaaaaaatgctatttttataattaatgatacgaaaattattacaagattgcttgaaggagattttattgattataaaaaattattgccaagagaacataacagcagagttaaattaaacactaaggaacttttaaatagtatagagagagcgtctttattgtctcaatcagaaaaaaataatcttataaagttatctataagagataaagtaatggcaattacttctaacacagaaaaaggaaatgtgtatgaagaagttgaaatagatttagatggagattacctagatatagctttcaattctagatattttatcgaaggtttgaaaaatatagataatgaggaaatatttatagaatttactacaaatgtaaatccttgtataattaaaccaacagatgatgttaattatatttacttactgcttccagtaagaatatcatcaaatatatagcagacatgaaggagttgtcttttgtagaaaatttttctaatcttagacaactccttttataagcatatttatggtataatatacttttagtgtatcaataggaatttgtttaaaatagtgacaaggaggaactattatgactgaaataactatagaatcagaatatataaagttggatcaatttcttaaattagcagagattgcatcaacaggaggtcatgcaaaatttttaattcaagaaggtttagtgacagtaaatgatgaaatagaattaagaagaggaaaaaagataaaatcaggagatatagttaaaatagaaggaactaaaataaaagtattgtaaaaaaaggagaactttttgtgaaacttaaaagtttgcaacttgttaattttagaaattataaaaagttgcatctggaatttaatgggaaagtaaatctacttgttggtaaaaatggtcaaggaaagacaaatatagtagaatctatttatatgctttcttttggaaaatcatttaggactaacaaagataaagaaatggttagatttaatagtgaaaacttatacattggaggaagtttttcaaaatataataaatatagtctaatagagctaattattggaaaagataaaaaggggataagaataaataaagttcctttacaaaagatacaagaactacttggcaacttaaatgttgttatattttctcctgaagatttaaggttggttaaagagggtcctaaagaaagaagggcatttatagacaaagagattagtcagattatacctaaatattataaatatcttaccaattataataaaacactttctcaaaggagtagggtgcttaaaaatatacatgttgatgaagctttattagatgtatatgatgatacgttagcaaagtatggaagttatatttatattttgcgtagagactttataaaaaagatagctaatatatctgaaaatatgcatatgaatttgactaatggagttgaaagattatcaattcgatataaaaatcaaataaatataactgatgaagatactatagatacagtatataataaatttttagccaagttgtcatcgaatagacctaatgatatagaatctaagactaccagatatggtatacacaaagatgacttaaatatattcataaatgatttagatgcaagactttttggttcacaaggtcaacaaagaactgcttcaatatcattaaagttatcagagatagaattaataaaaaatgaagttgaagaatatccagtattaattttagatgatgtttttagtgagttagatgaagcaagacaaaaacttttagtaaataatttaagcaatgttcaaatgtttataacaagtgctgaagtttcacataaaaaaatatttgatgaaaaaaatgttacaatatttaatattgaaaatggcgatgttattagcatagagaatggaggaaattaaatgaaacaagaatacggtgcaagtcagatacaagtattagagggattagaagccgttagaaaaagaccaggtatgtatattggtagtacaagccctagaggtttacatcacttagtttatgaagttgtagataatagtatagatgaggctttacaaggatattgttcagacatatatgtatctattaatgaagatggcagtgttttagtaaaagataacggaagaggtatacctgttgaaatacatcctaaaactggtaaatcaactttagaaacagtattaactaatcttcatgcaggaggaaagtttggaggcggaggatataaagtatctggaggtcttcatggagttggtgtttctgtagttaatgcattgtcaaaatggatggtagcagaggtttatttaaacggaaagatatataagcagacatatgagaaaggattaccaacatctaagcttgaagtagttggagaatctcaagataaaggaacaatgattcaatttatgccagatgagacaatatttgatgaaatagagtttaaatatgaaacattggagtataggcttagagaactttctttcttgaataaaggaataaaaatagtatttgaagataaaagagaaggacaagaaaaaagaaaagaatttcactatacaggtggtttggtagaatatattaagtatttaaataaatctagaactggtatacatgatgacatagtttatatagataaaaaggttgatgattgttttgttgaactagctatgcaatatacagatggttatacagagaacatatattcttttgcaaacaatataaatacacacgaaggtggttctcatttaagtggatttaaagcagctcttactaaaactgtaaatgattatgctaagagaaataaatttttaaaggaaaatgatgttaacctacttggtgaagacataagagaaggtcttacagcagtagtatcagttaaattaccagaacctcaatttgaaggtcaaactaaaacaaagctaggtaatagctttatgagaggtatagttgatagtgtaacagttgatgaactggggtctttcctagaagaaaacccatcaacagcaagaatcatagttgataaagctttaagagcacaaagagctagagaagctgcaaaaaaagcaagagaattaacaaggagaaaaagtgtattagaaagtacatctttacctggaaaacttgcagattgtgcagaaaaagatccatctaaaagtgaaatattcttagtcgaaggggattcagcgggaggttcagctaaacaaggtagagatagaaatagtcaagctatacttccattaagagggaaaatacttaatgttgagaaatcaagactagataggatactatcttcagatgaaataaaaaatatgataacagcttatggttgtggtattggagaagattttgatatagataaggctaggtatcataaaattataattatgaccgatgctgatgtagatggagcccatataagaactttattattaacattcttctttagatatatgagacctcttatagatgaggggtatgtttatgcagcacagccacctttatataaagtgacaaagcaaaagaaggaacattatgtttactcagataaagagttaaatatcttattagatgaaattggaagaaatggtgttgaacttcaaaggtacaaaggtcttggagagatgaatgcagagcaattatgggaaacaactatgaatcctgagacaagaactttattacaagttactgtagaagatgctgcaattgcagatgaagtattttcaatgcttatgggtgataaggttgctccaagaaaagaatttatagaagaaaatgcaagatttgttagaaatttagatatatagagagaggggattagtatacatggaagaaaataacaaaatactccctattgaaatagcggaagaaatgaaaaaatcgtatattgattattcaatgagtgttatagctggacgtgctcttcctgatgttagagatggtttaaagccagttcatagaagaatattatattcaatgagtgagttaaatttaactccagataaaccatacaggaagtcagctcgtattgttggggacgttttaggtaagtaccatcctcatggagatattgctgtttattatgctatggtaagaatggcacaagatttttcaactagagcacttttagtagatggtcatggtaactttggttctgttgatggggattcaccagctgctatgcgttatacagaagctaaaatgagtaaattatcattagaactactgagagatattgaaaaggaaactgtagactttaaaccaaactttgatgagtcgttaaaagagccttcagtattgccagctagatatcctaatttattagtaaatggctcaaatggtatagctgttggtatggcaacttcaatacctccacataatttagcagaagtaattgatgcaactgtatatttgatagataatccagagtgtagtgtagatgatttaataaaatttgttcaaggaccagatttccctacagctgcaattataatgggaaaagaaagtatagcagaagcatacagaactggaagaggaaaagttaaagttaggtctagagcttttatagaagaactaccaaaaggaaaacagcaaataatagttacagaaataccttatcaagtaaataaggctaaactggttgaaagaatagcagagttagttaaagaaaagagaatagaaggtatatcagacctaagagacgaaagtaatagaaatggtatgagaattgttatagaattaaagagggatgctaatgctaatatagtattaaataatttgtataaacattctcaaatggaagatacttttagtataataatgcttgcacttgtagatggtcagccaagagttttaaatcttaaacaaatattatatcattatattaaacatcaagaagatgttgttacaagaagaactaaatttgaactaaataaagctgaagcaagagcacatattttagaaggattaaagattgctttagataatatagatgctgttataagcttgataagagcttcaaagactgggcaagaagctaagataggtttaatagaaaaattcaaattaactgaaatccaagcacaagctatattagatatgagacttcaaagacttacaggtttagaaagagataagatagaagctgaatatgaagatttaatcaagaagataaatagattaaaagaaattttagctgatgaaagattacttttaaatgtaataaagaatgaaattacaataataaaagaaaattactctgatgagagaagaacagaaataagacatgctgaaggcgaaatagatatgagagatcttataagtgatgaagaaatagcaataactcttactcactttggatatataaaaaggcttccatctgatacttataagagtcaaaaaaggggtggaagaggtatttcagcacttacaactagagaagaagattttgtaaggcacttggtaactacaactactcatagtagactattattctttacaaataaaggtagagtatttaaattaaatgcatatgaaataccagaaggtaagagacaggctaaaggtactgctatagtgaatttacttcaattgtcagcagatgagaaaattgctactctaatacctattgatggtaatgatgaaaatgaatatttattacttgcaacgaaaaaaggtattgttaaaaagactaagagagaagagttcaaaaatataaataaatctggtcttattgctataggtttaagagatgatgatgagcttattggagtagaacttacagatggaaaacaagaagtacttttagtaactaaagaaggtatgtctataagatttgatgaaaatgatataagatatatgggtagaacagcaatgggtgtaaaaggtataactttaagtaaagaagattttgttgtgtctatgaacctttgcagtaaaggtacagatgtgttagttgtaagtaagaatggttttggaaagagaacaaatatagaagagtatagaagtcaaataagagctggtaaaggaattaaaacttataatatatctgaaaaaactggtacaattgtaggtgcagatatggtcaacgaagatgatgagataatgattataaattctgatggagttcttattagaataagagtcaatgaaatatcactgtttggaagagttacaagtggtgttaaattaatgaagacgaatgatgaagtcaatgtagtttcgattgccaaaataaatattgaagaagaataggataaatatcctattctttttgtataatgtagttagataaaaatttaaaattgaaaggagtaattgttatgtgcaataaaagaagttgtaaaaaaggtggatttttattattaggagctattttagggtttatatttggtatgttttttgcacctaaaaaaggttctgaactaagaaaagaaacaaaagagaagtttaatgatgtcaaagaaaatccaaaagaagttctacatgaaacatttaatgatgttaaagagagaataataaatttagtggacgatgataataatgaagaagatataaagatttcagaagaagatatagtaataagtaaaagctttgatgatgagggagatgttaactaatgaatgcatgggggtggcaaattggagcagtgttagtaggaagctctgctcttatagtagcaatttatttagctaaaactctaaacagcataaataaggttgttgaaaaggcatataagattgtagattataatgaaagacatatacaagatattgttgaaaatgcatcatcaatatcaaagggaatagatgatatagtttatgtaattaataaaatattgagtataggaaatatatttaaaattattaaaaggaaataggaggtttttacatgtctatgaatattgattcaaatttagattcacaaaataaattttggaatgtttgtcttgatggagaacttgatgtttctacagcagataaactaaaggaacatttacatgctttaatagaaaaaaatatgttagatgtaaagattaatcttaaagatttagattatatagactcaacaggcttaggagctatgataggtgtattaaaaaaattaaaaataaatgaaaaagagatatacatagtaaatcctaagagtaacgtaaaaaagatttttactataacaggtctagataaaatatttaaagtggagggataaactttggcttgtgagactataaagatggaaattactacaaatccagattatgttagtataataagattaacagcatctggaattgccaataagatgggttttccaatagatgatatagaagatataaaggtagcagtatctgaagcatgtacaaatgcaataaaacacagtaaagatgatgtgtttaatatagtatttaatattttagataatgcaattaatatagaaattcaagataatggaaaaggatatgatgttagctcaataagtacaccagatttagagaatccaaaagagagtggtcttggattgtttataattaaaactttaatggatgatgtagatattgaatcagaacataatcaagggacaaaaataaaaatgactaaatatttaggagttgatatttaatgaaaaatgtagctaatgctacacattacctaaatatggatacaaaagagctatttaatttatataataaaaataaaaatgtagacattagaaatattcttattgaaagacatctgtatttagcaagattgttagctaagaagtatataaacaaaggtgttgattttgaagatatatatcaagttgcttcattggcattaatttatgctattgatagatatgatgttgagaaaggatttgagttctccagctttgcgacaccaactatagtaggagaaataaaaaagtattttagagataaggtatggacacttagagtcccaagaagaatacaggaattaagcaaaaagataagtgatgcgaagattaaattagaacaagaaaataagaagcatccaaaggtaaaagatatagctgattatataggcgttagtgaagaagatgttttagaggctatggaggcttcttatggatatcaaccaatgtctttggattcatcaagtaatgatgattcagaggataaagatataactcttattgataagattggaaaagaagaaggtaactttggaagtatagagtatgaagattttattaataagtttattgaaactttaaatgaattagaagttaaaatttttaaagatagatttttctttgataaaacacaatctagtatagctaaagaactagggatatcacagatgactgtttctagactagagaaaaaggtagtagagaagctgaaaaaagaatatgaaaaaaatttataaaaaaatataaaaaaagtattgacctactgttttaaagatggtatagtattacttgtccttgaaaaaaggaacaagaaataaacacgaacattgaaaattaaacagtaggttaatttatattaagaaacaaaccataaagccagatattttgataacaatagtatctgagcctgataaacttttatttgagagtttgatcctggctcaggatgaacgctggcggcgtgcctaacacatgcaagttgagcgatttacttcggtaaagagcggcggacgggtgagtaacgcgtgggtaacctaccctgtacacacggataacataccgaaaggtatgctaatacgggataatatatttgagaggcatctcttgaatatcaaaggtgagccagtacaggatggacccgcgtctgattagctagttggtaaggtaacggcttaccaaggcgacgatcagtagccgacctgagagggtgatcggccacattggaactgagacacggtccaaactcctacgggaggcagcagtggggaatattgcacaatgggcgaaagcctgatgcagcaacgccgcgtgagtgatgaaggccttcgggtcgtaaaactctgtcctcaaggaagataatgacggtacttgaggaggaagccccggctaactacgtgccagcagccgcggtaatacgtagggggctagcgttatccggatttactgggcgtaaagggtgcgtaggcggtctttcaagtcaggagtgaaaggctacggctcaaccgtagtaagctcttgaaactgggagacttgagtgcaggagaggagagtggaattcctagtgtagcggtgaaatgcgtagatattaggaggaacaccagttgcgaaggcggctctctggactgtaactgacgctgaggcacgaaagcgtggggagcaaacaggattagataccctggtagtccacgctgtaaacgatgagtactaggtgtcgggggttacccccttcggtgccgcagctaacgcattaagtactccgcctgggaagtacgctcgcaagagtgaaactcaaaggaattgacggggacccgcacaagtagcggagcatgtggtttaattcgaagcaacgcgaagaaccttacctaagcttgacatcccaatgacatctccttaatcggagagttcccttcggggacattggtgacaggtggtgcatggttgtcgtcagctcgtgtcgtgagatgttgggttaagtcccgcaacgagcgcaacccttgtctttagttgccatcattaagttgggcactctagagagactgccagggataacctggaggaaggtggggatgacgtcaaatcatcatgccccttatgcttagggctacacacgtgctacaatgggtagtacagagggttgccaagccgtaaggtggagctaatcccttaaagctactctcagttcggattgtaggctgaaactcgcctacatgaagctggagttactagtaatcgcagatcagaatgctgcggtgaatgcgttcccgggtcttgtacacaccgcccgtcacaccacgggagttggagacgcccgaagccgattatctaaccttttggaagaagtcgtcgaaggtggaatcaataactggggtgaagtcgtaacaaggtagccgtatcggaaggtgcggctggatcacctcctttctaaggagaattacctactgtttaattttgagggttcgtttttacgaatactcaaaattagcacttttagcaacagaataaactgaacgcatgtgaagtttgtttgttggcgctgtgcgttagcactttaagcaacggaatttattcgttggcgccgtgctttagcactttgaaaactgcatatatatttagtgatatgacatctaatttgtaatatataaagctgataactttttaaaattatcgaagttgatagcttctaatctatcaaacctttttaactggtcaagttattaagggtgcagggcggatgccttggcactaggagccgatgaaggacgtgataagctgcgataagcttcggggagttgcacgtaaactttgatccgaagatttccgaatgaggaaactcacttagagtaatgtctaagtatcattaagtgaatacatagcttaatgaggggaactcagggaactgaaacatctaagtacctgaaggaagagaaagaaattcgattccgtaagtagcggcgagcgaacgcggattagcccaaaccaataaagttttctttattggggttgcggacatatcataacgaagaggtatcgtaattgaagaggtttggaaagacccaccacagaaggtaatagtcctgtatgttaaacgagaagacttcagatatgatccagagtaccacgggacacgtgaaaccctgtgggaagcaggagggaccaccctccaaggctaaatactacctagtgaccgatagcgtatagtaccgtgagggaaaggtgaaaagaaccccgggaggggagtgaaatagaacctgaaaccctgcacttacaagctgtggaagcacatttcttgtgtgaccgcgtactttttgtagaacgggccaacgagttacgttaagtagcaaggttaagcacttaaggtgcggagccgtagcgaaagcgagttttaactgagcgttcagttacttgacgtagacccgaaaccgggcgacctacccatgagcaggatgaagcgaaagtaaaatttcgtggaggtccgaacccacgagcgttgaaaagctcggggatgacttgtgggtagcggtgaaattccaatcgagcccggagatagctggttctccccgaaatagctttagggctagcctcaaggtgagagatacggaggtagagcactgaatgtcctagggggtattgcacctaccgaagactatcaaactccgaatgccgtcatcttatacttgggagtcagactgtgggtgataagattcatagtcgaaagggcaacagcccagatcgtcagctaaggtccctaaatgtaagttaagtggtaaaggatgtgggattgcacagacaaccaggatgttggcttagaagcagccactcattcaaagagtgcgtaatagctcactggtcgagtgatcctgcgccgaagatttccggggctaaaacttactaccgaagctacggcatcagtaatgatgggtaggggagcttcccatacgggttgaagcatgaccgtaaggacatgtggacagtatgggagtgagaatgttggcatgagtagcgagatgtgggtgagaatcccacaggccgtaaacccaaggtttccaggggaaggttcgtccgccctgggttagtcgggacctaagctgaggccgaaaggcgtaggtgatggacaacaggttgatattcctgtactaccgataaccgtttgagagaagggatgacacagtaggataagctaagcacactgttggttatgtgtgcccaagcattgaggcagtcaaagtaggcaaatccgctttgataatgctgggatgtgatggggagcgaaatttagtagcgaagtagctgatttcacactgtcaagaaaagtctctatcgaggttaaaggtacccgtaccgcaaaccgacacaggtgggtgaggagagtatcctaaggccagcgagagaactgttgttaaggaactcggcaaaatgaccccgtaacttagggataaggggtgccaccatcaggtggccgcagagaataggcccaagcgactgtttaccaaaaacataggtttctgctaagtcgcaagacgatgtataggagctgacgcctgcccggtgctggaaggttaaggggatctgttagagcaatcgaagcagtgaacttaagccccagtaaacggcggccgtaactataacggtcctaaggtagcgaaattccttgtcgggtaagttccgacccgcacgaaaggcgtaacgatttgggcactgtctcaacaacagactcggtgaaattgtaattccggtgaagatgccggatacctgcgacaggacggaaagaccccatggagctttactgtagcttgacattgggtcttggtactacatgtacaggataggtgggaggctttgaaaccaggacgccagttttggcggagccatccttgggataccacccttgtagtactgggactctaaccataggccatgaatctggtcttgggacactgtcaggtgggcagtttgactggggcggtcgcctcccaaaaggtaacggaggcgctcaaaggttctctcagtacggtcggaaatcgtacgtagagtgtaaaggcaaaagagagcttgattgcaagacatacaggtcgagcaaggatgaaaatcggacttagtgatccggtggttctgcgtggaagggccatcgctcaacggataaaagctaccctggggataacaggcttatctcccccaagagtccacatcgacggggaggtttggcacctcgatgtcggctcatcacatcctggggctgtagtaggtcccaagggttgggctgttcgcccattaaagtggtacgcgagctgggttcagaacgtcgtgagacagttcggtccctatccgtcgcaggcgtaggaaatttgagaagacctgtccttagtacgagaggaccgggatggacgtacctctggtgtaccagttgtcctgccaagggcatggctgggtagctatgtacggaatggataagcgctgaaagcatctaagcgcgaagccaacttcaagataagatttcccaccgcaagggtaagaccccagaaagactatctggttgataggtcgaaggtgtaagtgcagcaatgtatttagcttatcgatactaataggtcgaggacttgaccaatattatttgatgtcattcattaagatatatgtgcagtttttagagtgctaaatctatatttttaaacttgtcaaaacttatggatttttaatagttttataaggcaaaaaatcgaataaaaaaagtattgacacaataagacaaagatgttattataatacttgtcttagaaaaaaagttaaatgaaaatttagacaataatctggttataatagcagagaggatacacctgttcccattccgaacacagaagttaagctctctagcgctgatggtacttggtgggaaaccgcctgggagagtaggacatagccaggtaatgtgccgaagtggcggaactggcagacgcacaggacttaaaatcctgcgggacttacctctcgtaccggttcgattccggtcttcggcaccacaaattattgtgggccattagctcagttggttagagcgcccggctcataaccggtaggtctggggttcgagtccctgatggcccaccacaataatttaaagaactttgaaaattaaacagtaggttaatttataaacaagaaacaaaccataaagccagatattttgataacaatagtatctgagcctgataaacttttatttgagagtttgatcctggctcaggatgaacgctggcggcgtgcctaacacatgcaagttgagcgatttacttcggtaaagagcggcggacgggtgagtaacgcgtgggtaacctaccctgtacacacggataacataccgaaaggtatgctaatacgggataatatatttgagaggcatctcttgaatatcaaaggtgagccagtacaggatggacccgcgtctgattagctagttggtaaggtaacggcttaccaaggcgacgatcagtagccgacctgagagggtgatcggccacattggaactgagacacggtccaaactcctacgggaggcagcagtggggaatattgcacaatgggcgaaagcctgatgcagcaacgccgcgtgagtgatgaaggccttcgggtcgtaaaactctgtcctcaaggaagataatgacggtacttgaggaggaagccccggctaactacgtgccagcagccgcggtaatacgtagggggctagcgttatccggatttactgggcgtaaagggtgcgtaggcggtctttcaagtcaggagtgaaaggctacggctcaaccgtagtaagctcttgaaactgggagacttgagtgcaggagaggagagtggaattcctagtgtagcggtgaaatgcgtagatattaggaggaacaccagttgcgaaggcggctctctggactgtaactgacgctgaggcacgaaagcgtggggagcaaacaggattagataccctggtagtccacgctgtaaacgatgagtactaggtgtcgggggttacccccttcggtgccgcagctaacgcattaagtactccgcctgggaagtacgctcgcaagagtgaaactcaaaggaattgacggggacccgcacaagtagcggagcatgtggtttaattcgaagcaacgcgaagaaccttacctaagcttgacatcccaatgacatctccttaatcggagagttcccttcggggacattggtgacaggtggtgcatggttgtcgtcagctcgtgtcgtgagatgttgggttaagtcccgcaacgagcgcaacccttgtctttagttgccatcattaagttgggcactctagagagactgccagggataacctggaggaaggtggggatgacgtcaaatcatcatgccccttatgcttagggctacacacgtgctacaatgggtagtacagagggttgccaagccgtaaggtggagctaatcccttaaagctactctcagttcggattgtaggctgaaactcgcctacatgaagctggagttactagtaatcgcagatcagaatgctgcggtgaatgcgttcccgggtcttgtacacaccgcccgtcacaccacgggagttggagacgcccgaagccgattatctaaccttttggaagaagtcgtcgaaggtggaatcaataactggggtgaagtcgtaacaaggtagccgtatcggaaggtgcggctggatcacctcctttctaaggagaattgcctactgtttaattttgaaagttctttacgaactttatatatgggggtgtagctcagttgggagagcacttgccttgcaagcaaggggtcaggagttcgactctcctcatctccaccatttaagagtatattacttaaatctttgatttacttagtagcctcttacaatgcacttatagcttaaatttatacaagctttgtgcgttagcactttaagcaacgggatttattcgttggcgacgtgttttagcactttgaaaactgcatatatatttagtgatatgacatctaatttgtaatatataaagctgataactttttaaaattatcgaagttgatagcttctaatctatcaaacctttttaactggtcaagttattaagggtgcagggtggatgccttggcactaggagccgatgaaggacgtgataagctgcgataagcttcggggagttgcacgtaaactttgatccgaagatttccgaatgaggaaactcacttagagtaatgtctaagtatcattaagtgaatacatagcttaatgaggggaactcagggaactgaaacatctaagtacctgaaggaagagaaagaaattcgattccgtaagtagcggcgagcgaacgcggattagcccaaaccaataaagttttctttattggggttgcggacatatcataacgaagaggtatcgtaattgaagaggtttggaaagacccaccacagaaggtaatagtcctgtatgttaaacgagaagacttcagatatgatccagagtaccacgggacacgtgaaaccctgtgggaagcaggagggaccaccctccaaggctaaatactacctagtgaccgatagcgtatagtaccgtgagggaaaggtgaaaagaaccccgggaggggagtgaaatagaacctgaaaccctgcacttacaagctgtggaagcacatttcttgtgtgaccgcgtactttttgtagaacgggccaacgagttacgttaagtagcaaggttaagcacttaaggtgcggagccgtagcgaaagcgagttttaactgagcgttcagttacttgacgtagacccgaaaccgggcgacctacccatgagcaggatgaagcgaaagtaaaatttcgtggaggtccgaacccacgagcgttgaaaagctcggggatgacttgtgggtagcggtgaaattccaatcgagcccggagatagctggttctccccgaaatagctttagggctagcctcaaggtgagagatacggaggtagagcactgaatgtcctagggggtattgcacctaccgaagactatcaaactccgaatgccgtcatcttatacttgggagtcagactgtgggtgataagattcatagtcgaaagggcaacagcccagatcgtcagctaaggtccctaaatgtaagttaagtggtaaaggatgtgggattgcacagacaaccaggatgttggcttagaagcagccactcattcaaagagtgcgtaatagctcactggtcgagtgatcctgcgccgaagatttccggggctaaaacttactaccgaagctacggcatcagtaatgatgggtaggggagcttcccatacgggttgaagcatgaccgtaaggacatgtggacagtatgggagtgagaatgttggcatgagtagcgagatgtgggtgagaatcccacaggccgtaaacccaaggtttccaggggaaggttcgtccgccctgggttagtcgggacctaagctgaggccgaaaggcgtaggtgatggacaacaggttgatattcctgtactaccgataaccgtttgagagaagggatgacacagtaggataagctaagcacactgttggttatgtgtgcccaagcattgaggcagtcaaagtaggcaaatccgctttgataatgctgggatgtgatggggagcgaaatttagtagcgaagtagctgatttcacactgtcaagaaaagtctctatcgaggttaaaggtacccgtaccgcaaaccgacacaggtgggtgaggagagtatcctaaggccagcgagagaactgttgttaaggaactcggcaaaatgaccccgtaacttagggataaggggtgccaccatcaggtggccgcagagaataggcccaagcgactgtttaccaaaaacataggtttctgctaagtcgcaagacgatgtataggagctgacgcctgcccggtgctggaaggttaaggggatctgttagagcaatcgaagcagtgaacttaagccccagtaaacggcggccgtaactataacggtcctaaggtagcgaaattccttgtcgggtaagttccgacccgcacgaaaggcgtaacgatttgggcactgtctcaacaacagactcggtgaaattgtaattccggtgaagatgccggatacctgcgacaggacggaaagaccccatggagctttactgtagcttgacattgggtcttggtactacatgtacaggataggtgggaggctttgaaaccaggacgccagttttggcggagccatccttgggataccacccttgtagtactgggactctaaccataggccatgaatctggtcttgggacactgtcaggtgggcagtttgactggggcggtcgcctcccaaaaggtaacggaggcgctcaaaggttctctcagtacggtcggaaatcgtacgtagagtgtaaaggcaaaagagagcttgattgcaagacatacaggtcgagcaaggatgaaaatcggacttagtgatccggtggttctgcgtggaagggccatcgctcaacggataaaagctaccctggggataacaggcttatctcccccaagagtccacatcgacggggaggtttggcacctcgatgtcggctcatcacatcctggggctgtagtaggtcccaagggttgggctgttcgcccattaaagtggtacgcgagctgggttcagaacgtcgtgagacagttcggtccctatccgtcgcaggcgtaggaaatttgagaagacctgtccttagtacgagaggaccgggatggacgtacctctggtgtaccagttgttctgccaagggcatggctgggtagctatgtacggaatggataagcgctgaaagcatctaagcgcgaagccaacttcaagataagatttcccaccgcaagggtaagaccccagaaagactatctggttgataggtcgaaggtgtaagtgcagcaatgtatttagcttatcgatactaataggtcgaggacttgaccaaattatttgatgtccattcaataaaatatatatgtagtttttagagtgttaactctaaagaaactagtattactagattctaaaaacttaatagaaatattaagcataaagattatgtggttacaatagcagagaggatacacctgttcccattccgaacacagaagttaagctctctagcgctgatggtacttggtgggaaactgcctgggagagtaggacgtagccacgtaatcttttttatttgcaataaagtttaatattaaatagaatataaaatcaatattgatttataataagataaaatatagaattatatagtataggtaaagtttttgatttagaaagaaggtgtaatatgaattctgatgaaagaagaagcaaattaatagatattttaaaagaatctaagtgccctgtaaaaggtggaatgctagctgagatattaaatgtaagtaggcaagtaatagtacaagatatagcccttataagagctagaggatttgaaataatagctacacctcaaggatatataatatataatcaaccatattttacaaagcaaataaaatgtaagaatcacaggaattctaaagaaatttatgatgaattaaagattattgtagatttaggtggaattgttaaggatgtcatcgtaaatcatccaacatatggtcagataactgcagagcttaatattcactctaaaatggatatagataattttatgaagaaggttgagacaaatgaatttaaacagttatcagttctaactgaatgtagtcatattcatacaattgagacattaaaagaagagactatagaagttataacaaaagaattagaggacagaggaatattatcataaggaggagttaaatgaattttttatcattagctaaggctgcttcaacaaatagtaatataactaaaagaactttagaaaatatgcttaataactttagtgataatataccaaatattatatatgcaataatcgtatttgtaataggtatctatatatctaagatagtaagaaagatggtttcaaggtttttaatcaaatatggaatgagtaaaggtgtaaataatttcattgtatatggaatatacatatctatgttatctattatatcattgataagcttgggtgttatagggatacaaactacatcagttgtagctgtattaggagctgctggatttagtataggtttagcatttaaagaaatattatcaaatttaggttcaggtatgattattttattttttaagccatttaatataggtgattatattcaaggctcaggtgtagaaggcacagtttctgatatacaaatatttagtactgttcttaaaaccccagataataaaaccataattataccaaactttcaattgacaagtaacaatataattaattacacacatcaaaataaaagaaggatagatttttcatataatatttcatatgatagtgatattgatgtagttaagtccatattgaatgaaatttttataaatgaaaaaaggatattggatgacccaaaaccaattataggtttaaactctataggaaacaacactatgcaaatagttgctagaccatgggttaaaactgatgattactgggatgtttactttgatgtaatggaaaaagtcaaaaataaatttgacgaaaataatataaaagttccatttgttccttcctcgttattatttaataatatgagcaattcaaatacaatggataaaagatagaatttcaattaagtaaaaaagtgaatttaatataaaaaattaaagaaaattctaaaaaaatttgaataatagtattgaaagatgttaatatatataatataatgattatcaaataaaacaattagttaaaaagcggtgaaggaaaatagtaaaaaacagattgtattcagagaatgagtggatggtgagaactcattacaatggtttttgaatctactctagagcttctagttaaagctagacggtttacctacgttataggtctgagaggattatacgttttagtataatcaattagggtggcaacgcggataaaagattttcgtcccttttatagggtaaacggaggtctttttttatttttcaaatttgtttaaattaaaagtttacagctagaatacttgtaaattaattggaattataatttatattatcaaaattattaggaggaattaatatgttagatattaaaagaataagagaaaatctagatgatatcaaaaaagctatggaaagaagaggtgaaagagaatttgaccttgatgctgtagtggaactagataataaaagaagagaaatacttcaagaagttgaagttatgaaaaatgagttaaatgtaaattctaaaaaaatacctcaattaataaaagaaggaaaagatgtaacagaagaaaagacaagattgaaagagttatcagataagataaaaggtattgatgagaaagtaaaagaagtagaagcaaaaatggaatatacattaatgagaataccaaatgttcctcatccagaggtaccacaaggtgaaacagatgaagacaatgttcaaataagaacttggggagaacctactaaatttgattttgagtataaagcgcattgggatatagggacaggtctaggtattttagattttgaaagagcagggaaaataactgggtcaaggtttactttatataggggattaggagctagattagaaagatctttaatgaatttctttttaaatactcatacagctaagcatggctatacagaagtcttacctccatttatggccaatagaaatagttttatagggactggtcaacttcctaaatttgaagaagatatgtttaaaatagaaggattagagtatttcttaataccaacagctgaagttcctgttactaatatacatgctaatgaaatattagatgttgcagagcttccaattaaatactgtgcatatactccttgttttagatctgaagcaggttcagcaggaagagatacaagaggtttagttagacaacatcaatttaataaagttgaattagttaaatttgttaaaccagaagattcttataatgaattagaatcattaactcatgatgctgaaactatgttacaaatgttaggtcttccatatagagttgtaaaaatatgtacaggagatttgggatttacagctgcatttaaatatgatttagaagtttggatgccaagttacaatagatatgtagaaatatcttcttgttcaaattttgaagatttccaagcaagaagagcaggaataagatttaaaagagataaaaaatcaaaagcagaatatgttcatacattaaatggttctggattagcgataggaagatgtttggctgctatattagaaaattatcagcaggcagatggttctgtagtagttccagaagaattaagaccttatatgggtgttgatgttataaaataaatttatattaattgtatatgtagagtatgctttgatgaagagaatatattatgagtaaacaataaataaaaaaactatgaaattattataaatattaatttcatagtttttttatgttaatttacacagcagaattttcatcataaaacactaaatatttttataaaacactcttgtatgaatatctaaaaattattttagaactaattaaaaaaaatatcgctatatatagtaataattaaataaacaaaataaaattaagttgaattataaaatgaattatgataagataagtttgttataagttttgggaggaattatggaaagttcattttatatgaaagaagcattaaaagaagcatataaagcatataataaaaaagaaacaccaataggtgctattatagttaaagataatcaaataatagctagagctcataaccttacagaaacgttaaaagactctacggcacatgcagaaattttagcgataaaacaagcatcagaaaaattaggtggttggaggttgactgattgtgatttatatgttacaatggaaccttgcataatgtgtagtggcgcaatagttaattctagaataaaaaagcttataatagggacaagacatgtaaaaaattcatatatagaaaaacagcatgagtttaaattagattattttaataataataatgtaaaagtagcttttgatgttttgcaagaagaatgctcgatcatattgcaagaattttttaaggcattgagaaaaagagattaaggagagatggtcgagtggtcgaaggcgctcgcctggaaagcgagtatatgggtaaaactgtatcgtgggttcaaatcccactctctccgccagaaacaatgaaagtaattaaatatggttgtaattttgctgtactagatggggaggtagcggtgccctgtaacctgcaatccgctatagcaggattgaattccatctaaaggcttattttctgtagggccgccctaaataagtggtgttgatgcttaggtcctgcgcaatgaaagctcatgaaccccgtcagatccggaaggaagcagcggtaagtgatcacttttgtgtgccgtgggggtgcctaagttgagctaactgttttggtaacgcctatggaattaagtcgatagatggtgtacagcatttaatatataaaagactaatcccttagataatgagggatttttttattaattttgctaaagagaggtaaaaagatgcataaagcattatatagagcatatagaccacaaaaatttgaagatgttattggtcaagatcatattattaagactttaaaaaatcaaatatatagtgataatataggacatgcttatttgttttgtggaacaagaggtactggtaaaacatctactgcaaagattttttcaagagcagtaaactgtttgaataaaataaatgaagaaccgtgtaatgagtgtgagatatgtgaatctgtattaaaagataatacaatggatgttgtagaaatagatgcagcttcaaataatagtgtagatgatataagagagcttagagaaagtgtgaaatattctccagccaatgctaaatataaagtatatataatagatgaagttcatatgttgtctcaaggagcttttaatgcattattaaagaccttagaggaacctccatcatatgtaatttttatattagcaactacagagcctcacaaaatacctgcaaccattttatcaagatgccaaagatacgattttaaaagagttacagttaaagatatgacccttagaatgaaaaagatttgtgaagatgaaggaattgatatagatgataaagctcttaatttaatagctagaaattctcaaggagctcttagagatgcacttagtatattagaccaatgtatgtcttttggagaaagtaagatagattataaagatgttgttgaattaatgggaagcgtaaatatagaacaattatttgaattgtctcaatgtattgtagagcaggacactaaaaagtctcttgagatattaaatgaatttgtcttatggggcaaagatataagaaatcttataaatgacttaattgatcattttagaaatttaatggtatgtaaggtttcatcagaattggatgaaataatttcattaccagaagaaactatagaacaacttaaaattcagtctaaaaatatagatataaatgatttaataaggattttaaatatattatcaataactcaggatgatataaagtcatcttcaaatccaagggttttagtggaaataaccataatgaaaattgctcaaccaatgtttgatgaaagtaaagaagctcttataaaaagagttgagaacttagaaaaaatgattgaactggggaactttaagtctgaaaaaattgggaataataaagaaaaagagtatgaggtcgatagagaaatagatgtaaaacaagaaaatgtagtttatgaagatgtaaaaaatgaggacgttatacttatagagtcatcttggaagaatatacttaaacaaattaaaaaagataaaaaaatgccaatatacgcactcttaagtgaagtaaaaagttttaatgtatattctaatatgttgtatgttatatttgatgataaatttgattttgcaaaaactagactgagctctcaagatacaataaattatttagaaaaaacaataagagatgttttaaatagaagttttaatgtaaaaatagtactgacatcagaagttaaagatataaatcttgaagttaaagagaaaaaggacattggtgaggagatattaaagaacatagtgagtgaagagatattagaaataaaatatagtattgatgaaaatgagagtaaataataaaatactattatgatataataataaaatgaaaataagtttaggaggaatagtgtttatggctaaaaaaggttttggaggcggaatgatgcctggtggtggaaatatgaacaacttgttaaagcaggctcaaaaaatgcaagaaaatatgcaaaaagctcaacaagagttagaaagtaaagaagtagaagcttcagttggtggaggagcagttactgtaaaagttaatggtaaaaaagaagttatagatataactatcaagccagaagtagttgatccagatgatatagaaatgctacaagatttagttttaagtgcagtaaatcaagcattgagaaatattgatgatatacaagcaagtcaaatgagtaaggtaactggaggtatgaatatacctgggttattctagtaggtggtatttatgcaagtttatacaggtcccataacgagacttatagaggaattttcaaagcttcctggagtaggaagaaagactgctcaaagattggcttttcatattattaatatgaatactaatgatgtggaagctttatctaaagcgattatagatgcaaaaagagaaataagatattgctcaatttgttgtaatataacagatacagacccatgtagcatgtgttcaaataaaagtagagattcaagtgttatatgtgttgtggaagatccaagagatgtagcagctatggagagaacgagagagtttaaaggacagtatcatgtattaaatggagtaatttctccaatggatggaattggaccagatatgttaaaaataaaggaacttatccaaagacttggcaatcaggaagtcaaagaaataataatggcaacaaatcctactattgaaggtgaagcgacagccatgtatattgctaggttagtaaaaccaatgggaatcaaagtcactcggatagctcatggtcttcctgttggaggcgatttagagtatgcagatgaggtcacaatatcaaaagcactagaaggcagaagagaaatataaaaatcgaggttaatacctcgatttttgtagttttttgagttaaattcaaattaattttgatttagatttattgaataaatttcttctgtattgtataatttgttgtataaatcatttaaaaattttgataggggtgcaacatgaaaccaattatgaacttagaagaacataatgcaatgaaagaaaaaagagttaaaaaaatgaaatcaaaagataaacctaaatatgatgattttgaggatataagtttttctaataagaaaaaaactaaaaaaaatgtacgaaataaaaatgctgaatttagaaataattataaaaattatcagtatgattatgaagaagacttttatgaaccaatttaatattaaataattagaaaataaaaaatccctaatagataatatatatactatagggattttatttattttatcaaccagaaattatatttaaaattaaattagctatattttgggctgaatttgactttcttattgatttaacatttctttttagcatttctaatctgctagggtcatctattagaacttttagtaatattgacaagttatatttttttgtagttctaagtgctgcaccacaattagataagaaatcaagattctcttcttcctgacctggtatataataaggaactatcataggtacatcttttaaaagagcctcagttgtagtaagtccaccaggtttgcttactaatacatctatagaagctaaaatatcattcatcttatcagtgtatccaagaacacatacatttttatcatgataacgagacataagttttttttcgattttttcttttaggctttcattcttaccagtaattacaagtatttgaaaatctctatcagtatccagtaattcatcaagtgtctcttttatatttccagccccaaagctaccccccataagtaaaacagttaatttatcaggagataaattcaactcagaaagaacaatatctttatctctgtgagagagaaaagatttttcaacagggattccaaatgttctaattttactcggtccaactccatcaaacaccaataattcttttacatattcatgaccaacaatatagtaatcaatttcattttgtatccatgtagaatgagtagtataatcggttaatacagaaataagcggaggaacattaatggtatttgtataatgtttataaaaatgctctgtgtaagcatttgattcattattatgtaaattaaagttttttttcaatgtgcttagagcaatcattggaaaaggatgtgttcctataatcaagtctggtttttcgcttctaataagctttttaaattttttagccatgaatgttattagtagattatctttaaattcattttttgacaaaagatttgtttcagataatctatatacacttccataggctttgggagtatatatagcagatttttcgtatcctcttgaaattattttatccattgtattattaactaatttcaaactatctattatttcacattcaattggctctccatcaagtgttttggaagtaagttcttctttaatagctagagcagccctattatgcccaccaccagtggaagcagacattattaatacttttttgctcataataaaatcctcctaaaatgtagcatagtatttatattgtattatattttgatatataaaaactgtctttgtgaataaggttattgataaattatttttaatattaatctaatacaagattgcaaaaattacaagtgaaagaaatgtaaattaattttatcaaatatgttatattaaaaatattcttgtaaataaaaaatttaaatatagaataaaaaggaaaatagagcatagaatatatattagttttatgaaataaataggtttacttagcattaagttttaaaaattaaatataaagaatacatgataaataaaaaatttaaaaaaagtaaaaaattatattgactagaatagataaagatgatatagtattacttgtccttgaaaaaaggaaaaagaaataaacacgaacattgaaaattaaacagtaggttaatttatattaagaaacaaaccataaagccagatattttgataacaatagtatctgagtctgataaacttttatttgagagtttgatcctggctcaggatgaacgctggcggcgtgcctaacacatgcaagttgagcgatttacttcggtaaagagcggcggacgggtgagtaacgcgtgggtaacctaccctgtacacacggataacataccgaaaggtatgctaatacgggataatatatttgagaggcatctcttgaatatcaaaggtgagccagtacaggatggacccgcgtctgattagctagttggtaaggtaacggcttaccaaggcgacgatcagtagccgacctgagagggtgatcggccacattggaactgagacacggtccaaactcctacgggaggcagcagtggggaatattgcacaatgggcgaaagcctgatgcagcaacgccgcgtgagtgatgaaggccttcgggtcgtaaaactctgtcctcaaggaagataatgacggtacttgaggaggaagccccggctaactacgtgccagcagccgcggtaatacgtagggggctagcgttatccggatttactgggcgtaaagggtgcgtaggcggtctttcaagtcaggagtgaaaggctacggctcaaccgtagtaagctcttgaaactgggagacttgagtgcaggagaggagagtggaattcctagtgtagcggtgaaatgcgtagatattaggaggaacaccagttgcgaaggcggctctctggactgtaactgacgctgaggcacgaaagcgtggggagcaaacaggattagataccctggtagtccacgctgtaaacgatgagtactaggtgtcgggggttacccccttcggtgccgcagctaacgcattaagtactccgcctgggaagtacgctcgcaagagtgaaactcaaaggaattgacggggacccgcacaagtagcggagcatgtggtttaattcgaagcaacgcgaagaaccttacctaagcttgacatcccaatgacatctccttaatcggagagttcccttcggggacattggtgacaggtggtgcatggttgtcgtcagctcgtgtcgtgagatgttgggttaagtcccgcaacgagcgcaacccttgtctttagttgccatcattaagttgggcactctagagagactgccagggataacctggaggaaggtggggatgacgtcaaatcatcatgccccttatgcttagggctacacacgtgctacaatgggtagtacagagggttgccaagccgtaaggtggagctaatcccttaaagctactctcagttcggattgtaggctgaaactcgcctacatgaagctggagttactagtaatcgcagatcagaatgctgcggtgaatgcgttcccgggtcttgtacacaccgcccgtcacaccacgggagttggagacgcccgaagccgattatctaaccttttggaagaagtcgtcgaaggtggaatcaataactggggtgaagtcgtaacaaggtagccgtatcggaaggtgcggctggatcacctcctttctaaggagaattacctactgtttaattttgagggttcgtttttacgaatactcaaaattagcacttttagcaacagaataaactgaacgcatgtgaagtttgtttgttggcgctgtgcgttagcactttaagcaacggaatttattcgttggcgccgtgctttagcactttgaaaactgcatatatatttagtgatatgacatctaatttgtaatatataaagctgataactttttaaaattatcgaagttgatagcttctaatctatcaaacctttttaactggtcaagttattaagggtgcagggcggatgccttggcactaggagccgatgaaggacgtgataagctgcgataagcttcggggagttgcacgtaaactttgatccgaagatttccgaatgaggaaactcacttagagtaatgtctaagtatcattaagtgaatacatagcttaatgaggggaactcagggaactgaaacatctaagtacctgaaggaagagaaagaaattcgattccgtaagtagcggcgagcgaacgcggattagcccaaaccaataaagttttctttattggggttgcggacatatcataacgaagaggtatcgtaattgaagaggtttggaaagacccaccacagaaggtaatagtcctgtatgttaaacgagaagacttcagatatgatccagagtaccacgggacacgtgaaaccctgtgggaagcaggagggaccaccctccaaggctaaatactacctagtgaccgatagcgtatagtaccgtgagggaaaggtgaaaagaaccccgggaggggagtgaaatagaacctgaaaccctgcacttacaagctgtggaagcacatttcttgtgtgaccgcgtactttttgtagaacgggccaacgagttacgttaagtagcaaggttaagcacttaaggtgcggagccgtagcgaaagcgagttttaactgagcgttcagttacttgacgtagacccgaaaccgggcgacctacccatgagcaggatgaagcgaaagtaaaatttcgtggaggtccgaacccacgagcgttgaaaagctcggggatgacttgtgggtagcggtgaaattccaatcgagcccggagatagctggttctccccgaaatagctttagggctagcctcaaggtgagagatacggaggtagagcactgaatgtcctagggggtattgcacctaccgaagactatcaaactccgaatgccgtcatcttatacttgggagtcagactgtgggtgataagattcatagtcgaaagggcaacagcccagatcgtcagctaaggtccctaaatgtaagttaagtggtaaaggatgtgggattgcacagacaaccaggatgttggcttagaagcagccactcattcaaagagtgcgtaatagctcactggtcgagtgatcctgcgccgaagatttccggggctaaaacttactaccgaagctacggcatcagtaatgatgggtaggggagcttcccatacgggttgaagcatgaccgtaaggacatgtggacagtatgggagtgagaatgttggcatgagtagcgagatgtgggtgagaatcccacaggccgtaaacccaaggtttccaggggaaggttcgtccgccctgggttagtcgggacctaagctgaggccgaaaggcgtaggtgatggacaacaggttgatattcctgtactaccgataaccgtttgagagaagggatgacacagtaggataagctaagcacactgttggttatgtgtgcccaagcattgaggcagtcaaagtaggcaaatccgctttgataatgctgggatgtgatggggagcgaaatttagtagcgaagtagctgatttcacactgtcaagaaaagtctctatcgaggttaaaggtacccgtaccgcaaaccgacacaggtgggtgaggagagtatcctaaggccagcgagagaactgttgttaaggaactcggcaaaatgaccccgtaacttagggataaggggtgccaccatcaggtggccgcagagaataggcccaagcgactgtttaccaaaaacataggtttctgctaagtcgcaagacgatgtataggagctgacgcctgcccggtgctggaaggttaaggggatctgttagagcaatcgaagcagtgaacttaagccccagtaaacggcggccgtaactataacggtcctaaggtagcgaaattccttgtcgggtaagttccgacccgcacgaaaggcgtaacgatttgggcactgtctcaacaacagactcggtgaaattgtaattccggtgaagatgccggatacctgcgacaggacggaaagaccccatggagctttactgtagcttgacattgggtcttggtactacatgtacaggataggtgggaggctttgaaaccaggacgccagttttggcggagccatccttgggataccacccttgtagtactgggactctaaccataggccatgaatctggtcttgggacactgtcaggtgggcagtttgactggggcggtcgcctcccaaaaggtaacggaggcgctcaaaggttctctcagtacggtcggaaatcgtacgtagagtgtaaaggcaaaagagagcttgattgcaagacatacaggtcgagcaaggatgaaaatcggacttagtgatccggtggttctgcgtggaagggccatcgctcaacggataaaagctaccctggggataacaggcttatctcccccaagagtccacatcgacggggaggtttggcacctcgatgtcggctcatcacatcctggggctgtagtaggtcccaagggttgggctgttcgcccattaaagtggtacgcgagctgggttcagaacgtcgtgagacagttcggtccctatccgtcgcaggcgtaggaaatttgagaagacctgtccttagtacgagaggaccgggatggacgtacctctggtgtaccagttgttctgccaagggcatggctgggtagctatgtacggaatggataagcgctgaaagcatctaagcgcgaagccaacttcaagataagatttcccaccgcaagggtaagaccccagaaagactatctggttgataggtcgaaggtgtaagtgcagcaatgtatttagcttatcgatactaataggtcgaggacttgaccaatattatttgatgttattcattaagatatatgtgcagtttttagagtgttaactctatgtaaagtactaacttcaattgatgaagtatatatcgtaaaaacaattactatttagtacttcaaaactattgacatttaaaaataaagatgttaatataatacttgtcttataaataggcaatatgtggttataatagcaaagaggatacacctgttcccattccgaacacagaagttaagctctttagcgctgatggtacttggtgggaaactgcctgggagagtaggacgtagccacgtgaatattccaaggtagctcaatggtggagcaaccggctgttaaccggtaggctgtgggttcgagccccacccttggagccaaaaaaagccgaagtggcggaactggcagacgcacaggacttaaaatcctgcgggacttacctctcgtaccggttcgattccggtcttcggcacttataaaacaatatcgcggagtggagcagttggcagctcgtcgggctcataacccgaaggtcgtaggttcaagtcctgcctccgcaaccattaaaatggctcgttggtcaagaggttaagacaccgccctttcacggcggtaacaggggttcaattcccctacgagtcaccaattaaatatgcgggtgtagctcaatggtagagttctggccttccaagccagctgtgagggttcgatccccttcacccgctccaaaaatgggaccatagctcagctgggagagcacctgccttacaagcagggggtcacaggttcgagccctgttggtcccaccatttgcggcctggtagttcagttggttagaatgccagcctgtcacgctggaggtcgagggttcgaacaccttccaggtcgccaaaataaaatgctggtgtggctcaacggtagagcagctgacttgtaatcagcaggttgtaggttcgattcctatcaccagctccatgtaaaattaatacggaggatttcccgagcggccaaagggggcagactgtaaatctgttgtcatcgacttcggtggttcgaatccaccatcctccaccaaaaaatgcgcggatgtggcggaattggcagacgcactagacttaggatctagcgccattggcgtgggggttcgactcccttcatccgcaccatttttgtttgatatacatatataaattgtgggtgcatagctcagctggatagagcaacgcccttctaaggcgtgtgtccggggttcgaatccctgtgcgctcaccacatatattggggattagccaagtcggtaaggcacatgactttgactcatgtatgcgtaggttcgagtcctgcatccccagccaaatgatgtattactaagctatatttgaactatttttattttaaatatagttaggttcaattttagaataagtttaagtatccgaatgtggagaggtgtccgagtggtttaaggagctggtcttgaaaaccagtgacttcgaaaggggccgtgggttcgaatcccaccctctccgccaaatgcccagatagctcagtcggtagagcaggggactgaaaatccccgtgtcggtggttcgattccgcctctgggcaccaaaatatggcggtatagcttagttggctagagcgttcggttcatacccgaaaggtcataggttcgactcctattaccgctactaaaatttaatgtgggccattagctcagttggttagagcgcccggctcataaccggtaggtctggggttcgagtccctgatggcccaccacattaaattaattaatataaattcgaggtgtagcgcagtttggtagcgcacatggtttgggaccatggggccgggggttcgagtcccttcacctcgaccaatataaggtgggtatagctcagttggttagagcgccagattgtggctctggaggtcgtgagttcgactctcattatccaccccaattcatatggtctattagctcagtcggtagagcacctgacttttaatcagggtgtcccgcgttcgagtcgcggatagatcaccaaaaaggtggcgacatagccaagtggtaaggcagtggactgcaactccttgatccccagttcgaatctgggtgtcgcctccaaaatattccaaggtagctcaacggtggagcaaccggctgttaaccggtaggctgtgggttcgagccccacccttggagccaaaaaagccgaagtggcggaactggcagacgcacaggacttaaaatcctgcgggacttacctctcgtaccggttcgattccggtcttcggcacttataaaacaatatcgcggagtggagcagttggcagctcgtcgggctcataacccgaaggtcgtaggttcaagtcctgcctccgcaaccattaaaatggctcgttggtcaagaggttaagacaccgccctttcacggcggtaacaggggttcaattcccctacgagtcaccaattaaatatgcgggtgtagctcaatggtagagttctggccttccaagccagctgtgagggttcgatccccttcacccgctccaaaaatgggaccatagctcagctgggagagcacctgccttacaagcagggggtcacaggttcgagccctgttggtcccaccatttgcggcctggtagttcagttggttagaatgccagcctgtcacgctggaggtcgagggttcgagccccttccaggtcgccaaaataaaatgctggtgtggctcaacggtagagcagctgacttgtaatcagcaggttgtaggttcgattcctatcaccagctccatgtaaaattaatacggaggatttcccgagcggccaaagggggcagactgtaaatctgttgtcatcgacttcggtggttcgaatccaccatcctccaccaaaaaaatgcgcggatgtggcggaattggcagacgcactagacttaggatctagcgccattggcgtgggggttcgactcccttcatccgcaccatttttatttaatttaataaacgagcgggaatagttcagtggtagagcgcaaccttgccaaggttgaagtcgcgagttcgaatctcgtttcccgctccaaattttatgtttatgttgtaatgtgggtgcatagctcagctggatagagcaacgcccttctaaggcgtgtgtccggggttcgaatccctgtgcgctcaccacatatatattggggattagccaagtcggtaaggcacatgactttgactcatgtatgcgtaggttcgagtcctgcatccccagccaaaaaatatggtctattagctcagtcggtagagcacctgacttttaatcagggtgtcccgcgttcgagtcgcggatagatcaccaatggagaggtgtccgagtggtttaaggagctggtcttgaaaaccagtgacttcgaaaggggccgtgggttcgaatcccaccctctccgccaaatgcccagatagctcagtcggtagagcaggggactgaaaatccccgtgtcggtggttcgattccgcctctgggcaccaaaatgtggcggtatagcttagttggctagagcgttcggttcatacccgaaaggtcataggttcgactcctattaccgctactaaaatttaatgtgggccattagctcagttggttagagcgcccggctcataaccggtaggtctggggttcgagtccctgatggcccaccacattaaattaacttatggtgggtatagctcagttggttagagcgccagattgtggctctggaggtcgtgagttcgactctcattatccaccccaacttatatggtctattagctcagtcggtagagcacctgacttttaatcagggtgtcccgcgttcgagtcgcggatagatcaccaaaaaggcggcgacatagccaagtggtaaggcagtggactgcaactccttgatccccagttcgaatctgggtgtcgcctccaataaaatgcgctcatagctcaactggatagagtgtctgactacgaatcagaaggttaggggttcgagtccctttgggcgcaccatatgaatagcgagggattatagctcagctgggagagcacctgccttacaagcagggggtcacaggttcgagccctgttaatcccaccagtgcaaacctctagtaaaactactagaggttttatttttgattgaaaaagtttttatatttaggaggtaagaaatttgtatatagtaataggaaatgaaatagttgatagtgaagaacttaaaataattatagatgaaaatagtaaatttaaagttgaaaaagatttaagtaaaagcacaaaaagagaagatgtaatagcatatcagttaagtatagatttaaattacctagattctcttataaatgagcaatgtaatttgtccagtttatctgatgaagagaaatttgatgaatatatgactttgtctgatgaacttgcactggatttagaagagttaatgccaaaatatacaataataaatgctagagcatataaattagacgaggtagatggaattgtaaaaataatactagctgtagcgtatgcagatttagggcacttaaaactttctgatgtagtaaagaggctatctagacaagtagattaggatatgaatatgaactatattaaaaaaatgtataaaatcttacgtaaagatgaaaataattatgtaaacatagaaaaaaacagtataaaatcaagtcaattgtagaaattttcacataaattcatctgaaattctataaaaaatgccttaattttaatgaggtaaatcgagtttacacagtctaaaaattacttatatttataaatttatcttattaattaaggaactttcttaaacatcttcaaaaataaagtattttagtctataatctttaatattacacaaacaataaaggagaagaatagagtatgcttaaaaagtttaataaaatactagtggctaatagaggcgaaatagctataagaatatttagagcctgttcagaattggggataaaaagtgttggtatatacagtaaggaagataagtatggattgtttagaacaaaagcagatgaatcatatttgataggagaaggtaaagggccaatagatgcatatttagatatggatggaataatagacctagcaaagagaaaaaaagttgatgctatacatccaggatatggttttctagcggagaatgcagaatttgctcgtaaatgtgaagagaatggaattacttttataggaccatcatctaaggtaatgaatatgatgggggataagattaactctaaaaaaatcgcaaaagaagttaatgttcaaactataccaggagtagaaaaagcaataagaagtactgaagaagcaaaggaagttgcaaacaaaataggatatcctgttatgataaaagcatctaatggcggtggcggtagaggtatgagaattgtacatcgcgaagaagacttagaacttgaatatgaaactgcttgtagtgaatcaagaaaagcttttggagaagatattatatttatagaaaaatatatagctgatccaaaacatatagaagttcaaatattaggtgataattatggaaatatagttcacttatatgaaagagattgttcagttcaaagaagacatcaaaaaataatagaatatgcaccagctttttcgttagatgataaagtaagaaaagagatatgtgaagatgcagttaagttatcaaaacatgtgggttattctaatgcgggaacattagaatttttagtagatgcaaatggtgggcattattttatagagatgaacacaagagtacaggttgaacatactgtaacagagatggttacaggaatagatatagttcaaagtcaaatactaatagcccaaggttacagcttagatagtgaagaaattaatataaaatcacaagatgatgtggaaataagaggttactctatccaatgtagaataactacagaagaccctaagaataaattcatgcctgatacaggtaaaattcaagtttatagaactggttcaggatttggtataagactagatggaggaaatggatttacaggggcaaacataagtcctcattatgatagtttattggttaagacaatatcttgggatagaacattccaaggagcaataaataaaactataagatctataaaagaacttagagttagaggtgttaaaactaatgtaggattcctagttaatgttttaaataatcctatattctcaaatggtaaatgtagtactaagtttatagatgaaaatccagatttatttgaaataacagaaagtaaagacagaggaacaaaattacttcaatttataggagatgtaattgtaaatgataatgcttgtaaagaaaaaccactatttgatgcattacatgacccaagaatggataaggatggttcaaaatcagaaggaagtaaaatacttttcgataagttaggtaaatctgcatatatagaaaagataaaaaatgataagaaattactattaacagatacaacaatgagagatgcacatcaatcattattagcaacaagaataagaacatatgacttattaaaagctgctaagccaacagaaaaatatcaaaaggatttattctcacttgaaatgtggggaggagctacttatgatgttgcatatagatttttaaaagaatctccttggcgtagattacaaaagctaagagaagaaataccaagcataatgttccaaatgttgcttagagcatcaaatggagttggatataaaaactatccagataatgtaatagaagaatttacaaaagaatctgctagacaaggtatagatgtatttagaatatttgattcattaaactgggttgaaaatatgaaaccatctattaatacagctttagaaactggaaaaattgttgaagcaactatgtgttatacaggtgatatactagataagactaaaactaaatacaatctagaatattatattaaaatggcacaagaattagaaagcttgggagcagatataatagcaataaaagatatgtcaggtcttcttaaaccatattcagcttacacactagttaaagagttaaagaaaaatgtaaaagcaccaatacatttacacactcatgatacaagtggaaatggtgtagcaacttgtttaatggcgtcagaagctggagtagacataattgatgctgcattagaatctatggcaggacttacaagtcagccatcgcttaatgctatagtagaggcacttaagaatacagagagagatacaggaatagatttatttggatatgatgagttaggaaaatattataaggatttaagaaaagtttataataaatttgaaagtgatttaactaattcttgtgcagaaatatataattttgaaataccaggaggccaatatacaaacttaaaacctcaagctgatagtttaggattagttaatagatttgatgaagttaaagaaaaatataaagaagctaatgaagttgtaggagatataataaaagtaactccatcttcaaaagttgtaggagacttagctatctttatgactaaaaataaattagataaagacaatataatagaagaaggtaaaaatttatcattcccagattctgttgtggattactgtaaaggtatgattggtcaaccagaaggtggaataccaaaagatttacaagaggtagttctaaaaggtgaagaagctataacagtaagaccaggttcattattaccagcagaagattttgatgaaatagctaaatatctaaatgaaaagtatgatataaatgctaatataagaaatgttataagttatgctttatatccaaaagtatatgaagattatatcaaacatctacaacattataatgatatatctaaacttgaaagtgatgtattcttctatggattaaataaaaatgaagaatgtgaagtagaaatagaagaaggtaaggtattaacaataagattagttgaaattggtgaagttaaggaaaatggatttagaactataggatttgagttaaatggaatggttagagaagtagaaataaaagataagaatttctctggaaaaattaataatgttgaaaaagctgatatgaatgaccctcttcaaattggagcaagcataccaggaaaagttataaaaataatggttaaagaagaagatgaagtaaaagcaaatcaaccattaatcgttatagaggctatgaagatggaaactataatagttgctaagactgatggagtaattaagtcaatcaaagtaaaagaagatgatatggttgaagataaacaattattaatgataatgaagtaatttaattaaaataaattaaaaagcactctgaaatgtttaataaaaaatgttttagagtgtttttatttattttaattaaatatttgttaaaaaaaagaggacaattacctccagatgtagaaataaagctagtaaggaaaatgttatctaaaaattctaaatatagtaaatattttccataatatttcttaggaaataacagcaaagataaaatacataaatttaaaaggtgggtgcttatatgaaggtttatgatagtaaaatgttgagaaatgtagcagtattaggacatagcggatgtggaaaaacaaatctaatcgaaactatagcttacacagcaaacactaataagatacctaaattaacagacaaggtaaatatgacttatagcatgggattaatacctatagagtataatgattataagtttaacttattggataccccaggatattttgactttagcggagacgttgtgtcatctcttagagcaagtgatgcagcaataatagtaatagatgcaacagcgcctattcaagttggtacagagaaatcattagaactaactgagagtattcctaagataatgtttataaataaaatagataatgaaaaggcaagatacaaagatgcaatagcaatgttaagagaaaaatacaataataagatagttcctatgataagtcctatatacaaagataaaaactttgtaaagttacataatgtttttgaaaacatagatgatttagaaggtgaatttaaggaacaagctatgagtgttaaagaagcattaatggaacttatagcagaaactgatgaccaaatattagataaatattttaatggagaagaactaactacggaagagatacaaaaaggtattattataggtatacaaagaggtgatattatacctgtaatatgtggttcaactataaataatataggcacaaaggaaatattagatacaatatcaagttatttagaacctatctttacagaggaaagcaaaccatttaggggattagtatttaaaactatggttgacccatttgttggaaagatgtcatatataaagattactgagggtgtactttctaaggataaagatgtttttaatataaataaaaatgtaaaagaaaaaatagctaatatatatacattgagaaatagtgaattagtagaaatagaaaaagctaaagctggtgatatagtagttataactaaagttaattctctaaaaacaggagacactatatctgcagataaagatgcagaagctttagaaaagatagattttcctaaaccacaaatatattatgcagtaactcctaagaataaaggtgatgaagaaaaagtagcatctgtattaaataaactagtagaagaggaccctacattacattggtatagaaatacagagacaaaacaagcacttttaggaggtcaaggagaacttcatataaaaacaattaaaaataaaatgaaagataagtttggtgttgatgttgaattgaatgaccttaaagttccttatagagaaactataaaaggaacagccgatgtacaaggaaaacataaaaagcaatcaggtggtcatggtcaatatggagacgtaaaaataagatttgaaagatgtgaatctgattttgaatttacagaagaaatatttggtggttctgtaccaaaacaatatataccagcagttgaaaaaggtctaaaagactctatgcaaaaaggtatattagcaggttatcctgttacaaacataaaagctacgctttatgatggttcataccatgatgtagactcttctgaaatggcctttaagatggcagcaagtgcagcctttaaaaaaggtatggaagaagcgcacccaatactactagaacctataatgaaacttaagataactgttccagaagaatatatgggagatgtcatgggtgatataaataagagaagaggaaaaatatttggaatggaaccagatgacaaagggaaacaaataatatttgcagaagctccacaagcagagacatttaaatatgcaatagatttaagagcaatgacacaaggtagaggatactttgaaatggaattagagagatatggagaggttccatcacagtttgcagaaaaaataattgggttagctactgcaaagtaatgaacaaaataaatagaaaaataattaatatatattattaaaaatatttttagggttttaactaggtataggtttatgttaggtaaacttatacctagtttttatacatttttgatgaataaaaaaatatataatactttcttaaatgttttaataaaaagaaagtatttttttattattatttttacaaatgtttagtaataaagatgagaaggtatatttaaaatataaagtatttaaagttctgaaatctaatcatgaagcaaaaaattagcatttggttatcaataaatataataaataaaaactcataattaatgaaagaataaattcatatctaaatttctataaaaaatttaaatttatacaatttagggctttaaaaatttaaataataggtgtaaaataatagtcaaagaaagtcaaaaataaaaaggtgtgtggtgatattaatggcaactatgacagatataattgaaaaatttattaaagatttgatggaagaagataatagcatacaaattcaaagaaatgaactagcaaacttgtttagttgtgcaccatcacaaataaattatgtcttaacaacaagatttacaatagatagaggatattacattgaaagtaaaaaaggtggcggaggatatgttcaaatagaaaaaatacgaaaaagtaaagatggacatattagagaactactaaatgaaaaaataggaagtcagatatcctataaaaaagcaaaggaattattagaaggtttaaaagagtcggatttgattaacgaaagagaattaaaattaatattatatgcaatagatgataaatcattgtgtatgccaatatatgaattaaaagagaaggtaaggtctaatattttaaagaatataataataggattatttagtatagaggagtgataatttatgctatgtcaaaaatgcaataagaataaagcatctgtatattataataagatagtcaatggagaaaaaacagagatgtatttatgtagtgagtgtgcaaaagagaatacagaaatgaattttaacttagatatgcctttttcaatgatggatatattttctaatttaggttttcaacctaaaaaagaacttgaggaaaagctagtttgtcctaaatgcaatacaacatatagtgagtttaagaataatgggagatttggatgtagtgaatgttataatgcatttagtagtcaagtaaatccaatgcttcaaaatatacatgggcatatagaacatacaggaaaagcacctaaaaaatctttttataagataagtgtagaaaatgagattaaagaactaaaagaagatttagatagagctataaaaaatgaagagtatgaattagcagctcaatttagagataaaattaaatatttaaaaggttctattgactaagattggagtgatattatgaaagagaacatagtcatgaaatcaagagttaggctagctagaaatttaaataactatccatttccaaataaattagataaagaatgtgccatggaaataatagaaaaagtaaaaaatgcgtttattaattctaacttagaacaaaaagaagaatttgatttctataaaattgaagatttagaccaatctaaaaaaatgcttatggttgaagaacatataataagcccagatttagcagaaaatgataaaagtgcagttatagtaaaaaaagataaaactataagcataatgataaatgaagaagaccatataaggatacaaactatatgtgatgatttaaacttagaatatgcatatagtgtagcaaatgaaatagatgatttgttagaatcaagtttagaatatgcctttaacacaaagctaggttatctaacatcttgtccaactaatacaggaacaggaatgagagcttctgtaatgatgcatttaccagcattaagtcaactaggctatatggatgaactttataaaatttcatcacaaataggtatagcaattagagggatatatggagaacgaacagaagcattgggaaatatatatcaaatatctaatcaacttacacttggaagaacagagtctaatattatagaaaatgtaagtggacttacaaaagatgcaatttcaaaagaaataaaagctagagaaatattgcaaaaaaaattaggtataaaactagaagataaaatatttagatcgatagggacacttgaaaattcaagagtaatgagtagcgcagaggcaatgagccatctatcaaatataaaaatgggaatagaaatgaactatatagataaactagatttaagggctatagaacaacttatgataggtatacaaccagcgcatcagtcaataatgtataagagtgatgatgttgagaatagagatataaatagagcaacatatattagagaaactttggaaaaattaagaggagggatgaattgtgaacttcaatagatttacacaaagagctaaaaaggcaattgatttagcgtttgaatctgctaaaagtctaggacacaatattgttggaagtgaacatatacttttaggtcttttaagagaagaagaaggtatagctgctaaagttctaagtaaagttggatttacagaagcttatttagaaggcaaaatagttgatatggaaggtaagggagaagaaatctcagaagatatagtattaagtccaaggagtaaacaaatacttgaattatcaggaatgtttgcaaataaattaaaaacaaattatattgggactgagcatatattattagcaattattcaagaaggtgaaggaatagctaataagattttaaattatgctggagtaaatgataggactttagcccaattaacaattgatatgatgggtattagtgataaaaatcaatacaaagcagagaatagttacacgggcaaccagaatcaagcagaatctaaagtacttgataagtatggaagaaatcttacactatatgcaaaacagaataaaatagaccctgtaataggtagagaaaaagaaatacaaagagtaatacaaatattaagtagaagaactaaaaacaatccagtgttgataggagacccaggtgtagggaaaacagccatagctgaaggtctggctacaaatatagccttaggaaatgttccagaaacactaaaaaacaaaactttatactctttagagatgggttcattattggctggggctaagtatagaggagaatttgaagaaagaattaaagaagttgtagatgaagttgttaaaaatggaaacataatcttatttatagatgagatgcacacaataataggggctgggtctactggagaaggctctatagatgcttcaaatatattaaagccagccttggcaagaggagaaatacaagttataggtgcaactacaattgatgaatatagaaagcatgttgaaaaagattctgctctagaaagaagattccaaccagttatggtagatgaaccaactaaagaggactcaataaaaatattagaaggattaagagataaatatgaagctcatcataaagttaaaataactgatgatgctataaaggcagctgtagaattatcaactagatatatatcagacagatatctgccagataaagctatagacttgattgatgaagctgcatcaaaagtaagattaaaagaaaatacacctccttcagaaataaaaaaattagaactagaaatagaaaatatagataaagaaaaagaagaagcagtaagatgtcaagactttgagaaagcagccaaaataagagatgaacaaggtctacttaaaaaacaattagaagatgttagagaaagatggaacaagtcatctaaacattcagatttagttgatggagaagttattgctgaagtagtgggcttatggacaggaataccagttaataaaattcttgaagaagaggctgatagacttttgagacttgaggaaatactgcacaatagagttataggtcaagaacaagcagtaaaatctatttcaaaggcaatcagaaggtcaagagcaggtcttaaagaccctaatagaccaattggttcatttttatttttaggtccaacaggagtaggtaaaacagaattatctaaggcattagcagaagtgcaatttggagatgaaaatcaaataattagaatagatatgtctgaatatatggaaaaacatgctgtgtcaagaatgataggttcacctccaggttatgtaggtcatgatgaaggtggtcaattaactgaaaaagtaagaagaaatccatattcagttatcttatttgatgagatagaaaaagctcatccagatgtatttaatattctgttacaaattctagatgatggtagactaactgattcaaaaggaagaactgtagattttaagaatactattgtaataatgacatcaaatgttggagcatctacaattggtagacaaaaaactttaggatttagtatagctaaaggagacgaagaagaaaaatctcaatatgaaaaaatgaaagaaaatataatgggtgaattaaaacaaagattcagaccagagtttttaaacagaatagatgatataattgttttccactcactaaatgaaaatcatatatcaaaaatagtacttttaatggcagcgaaactacaagagagattaaaagaaatggatataaaattagaaatgagtgatgaggctgttaaattaatttctaaatctggatttgacttagaatatggagcaagacctcttaaaagagctttacaaaaagagttggaagatgagctatctgaagcaatcttaaaaggtaatgtgaaaaagggaagtaatgtagtagcaaaagtcaaagatgaaaaaatagtttttgaaactaaataatttaatagagttgcattttaaaatattgcaaatataagttttataatctaaacaaaattttaagggcaatgaatctataataattcattgtccttaattattttatttaatctttacatattgtctttcagatatgctaaaattatagtatagaataaaaaattaaggatgataaaagtatggcaaaaataaaaacaaaatatgtatgtcaatcttgtggatatgaaacagctaaatggcttggtaaatgtccagaatgtacaaaatggaatacatttgtagaagaaatagaccaaaaaagcaccaaaaaagaggtctttataatagataaatcttcatctaaaccagtcagtataaactcaatagaaagtaaagaagaagagaggtttacaacagatataaatgaattagatagagtgcttggaggaggtatagttaaaggctctttagtgcttgttggtggtgaccctggtataggtaaatcaacacttttaatccaagtatctagtaatgttgccaatttaggaaaaactgttttatatataactggagaagaatcagaatctcaaataaaaatgagagctaaaagattaggtattaactcagaaaatttatatatatttgctgaaaataatttaagtataattgaatcttatttagaaagtgtaaatccagaattaataattctagactcaattcaaactgtcttcagtccagaaatatcctcggcaccaggaactgtcagccaaattaaagaaggtacttcaaaattcatgaaaatttctaaaaaaatgggaatttcaacgttcatagttgggcatgttacaaaagaaggttcactagcaggaccaaaattattagagcatatggttgatactgttctatattttgaaggagaaagatataatacttatagattagtaagagctgttaaaaatcgatttggttcaactaatgaacttggagtatttgaaatgagggatttaggattagtagaacttgataatccatctaaaattttaatctctgaaaaaccaaaagatgtagcaggttcagtaataatatctactgtagaaggtacgagaccaatgttacttgaattgcaagcattagtttctcctacaagttttggtataccaaaaagaacatctacaggagtcgattacaatagagtaggtatgttattagcagtattagaaaaacgtgttggtttgcaaatacaaaatcaagatgtctatataaacatagttggaggaataaagataaatgaaccctcaattgatttagggatagccatttctgtagcatctagttttagaaatataccgatagatgaaaatatagctgttacaggagaagtgggacttacaggagaagttagagcagtaagctttatagaaaagagaatagctgagtgtaaaaaacttggatttaaaaagatagtagttcctagaagtaattatgatgttgtaaaagagaccaaaggcatagaaatatggccagtagataacttaagacaagctataaatatagtacttgggaggaatcaataaatatggagaattttctagataataaaaatatgctatatgcattaaaaatgatatctcctggaactccacttagattaggtctaaacaatgtactaagagctaagactggtggattaattgtaattgcaacaaacgaagatgtaatgaaaatagtagatggaggatttgctataaatgcagaatattcaccatcatatctatatgaattagctaaaatggatggagctatagttttaagtggtgatgtaaagaaaatattatttgctaatgcacaacttatacctgactattttatagaaacatcagagacaggaacaagacatagaacagcagaaagagtagcaaaacaaactggtgctatagtcataggaatttcacaaagaagaaatgttataacagtttatagaggaaatgagaagtatgtagtcgaagatatatctaagatatttactaaggcaaatcaggctatacaaactctggaaaaatataagacagtattggaccaagctgtaacaaatttaaatgccttagagtttaatgatttggtaactatttatgatgttgcattagtcatgcaaaagatggaaatggtaatgagagttacaagtataattgaaaaatatgtgatagaattgggtgatgaaggaactttagtaagtatgcaattagaagaattaatgggtacaaccagaatagaccagaaattaatattcaaagattataataaagaaaacacagaaataaaagaacttatgaaaaaggtcaaaaatttaaattcagaagaactaatagaattggtcaatatggcaaaactattagggtatagtggtttttcagaaagtatggatatgcctataaaaacaagaggttataggattcttagcaaaatacatagactaccaacagcaataatagaaaacttagtaaattattttgaaaactttcaacaaattttagatgcatctattgaagaattagatgaggttgaaggaataggtgaaataagagcaacatatataaaaaatggactcataaaaatgaaacaattagtcttattagatagacacatatgatgaattttaaatgaattttactacttttttcttgaatataatatacactttggtctataatagataagtataactagggggtgaagcattgataaggaaagtaacaagaatattgtttattttacttggatttacaataggtataacaacctatttaacattaatgaaagattttgaaatattaacatttggaaaagaaacatatggttatatcgcagctgtagtagcaggtataataatagccattttaggatatcttatagaaccatgggttgtaaataaagtaaaagaaattgctaaaatagtggataaagaattgtcaaaatatcctcagactgatatattgttagggtctatgggtcttatagtaggatttgttattgcgtatttattaagtggattagtaaatagaataccaatagtaggtggaatactatccttactattatatttattcctaggatatcttggaatgaaagttgcgcttaaaagtaaaaatgatttatttaatattggaaaactaggaagattagcaaatcctattaaggataaagataaggataaagaaaataaaaaagaagtaaaagccattcctccaaaagtattagatacaagtgtaataattgatggaagaatagctgatatttgtaagactgggtttatagaaggaaaacttattattcctgcttttgttttggaggaactaagacatattgcagattcttcagatgatttaaaaagagtaagaggtagaagaggtctggatatattaaatataattcagaaagaattaaatatagaagttgaaataagtgagagagactttgatgatatagcagaagttgatagtaaattattaaagcttgctcaggttttaaatggaaaagttgttacaaatgattataacttaaataaagttgctcaattccaaggtgttgaagtattaaatataaatgagttagctaatgctataaaaccagttgctataccaggtgaagatatggttgttcaagtggttaaagaaggaaaagaggctcaacaaggtgttgcatatctagatgatggaactatgatagttgttgatggaggaagaaaatatatgaatgagactataaaagtactcgttacttctgttcttcaaactcctgcaggtagaatgatatttgcaaaacctaaaaattaatatgttcaaagaaacctataatttgggctgtttattttaaatagatggtccaaatttatttatttataacgataatgtttaatgtattcttaaagatggggatttaaatcagaaagcagggagaatttatgagaaaaaagattatatctttcttagcaacatttatcataatattaacatcagcaagtcagtatagttttgcagatgatatgtcaacacgtggaaaagtaatatttatagatatgaatagaactagtatgagtaatatgttaagaataaaatcattaagagaagaactagacaatagagggtatattggcttgatgaatataagaggcgataaaggaagtgatgatagaaggtcatatgctagtatgggtgctggtggtagagctaatgtggctaatgaagaagatattaattttgaaagctcgagtaaggatagaaatatagtttttgaatcagctacaggaaaaagtgcaaaaggtataaataatttaactataaataagtctataaatgaaaatttaaactttggagagtatggttctgtattagggtcattaggacaaagtttatctgagaatggattaaaagcatctgtattgggtaattcagatataattgaaaatggtcaacttataaaaaatagaaacttatgtctaactgcaatggatgaatatggaagaatacctaatggaaatgtagatactataaataaaaaagacttatctatgccttatggaatatcaactgattatgataaattgattgtagagaccaaagaagcttacaaaaataatgatgtggtttttgtggagcttggagacacatatagattagatttatataaaccaaatttaaatgaaaaaacatatgagagtgtgaaagataacatagaaaaaaatatagatgtatatttaaaaaatatattttctatggttgaagaaaatgacactgtctacatagcaagtgcatttccaagtgatttagattataaaaataaaagaagactttctccaataataaaattaaatggagaagggaaaggtatattatcatcttcaactactagaagagaaggtattgtaacaaatttagatgttggggttgaaatattagacaactttaatataaaaaatcaaaatatggttggaagaaaatatgaacttattaacagagatgataataaagaatttttgatggatgaatatcaaaagatagtatctatttcaagcataaggtctacaatactgaatggttttgtaagtatagttttcttgtcatggatagttgctatgattgcaattttatttagaaagcatatatcaaaaaattataaagaaacaacattttttatattaaaggaacttttaaaaataggaatagtaatgccactgtcatttatgataacaccaataatgaatttcaaaacaccattagcaatatctttaggaataattataataacacttactatatatcttataagtaaagttttaataaagaatgatttaaaaaacatgctgttttttactggattaaccatagtaattatggttattgatgctgggtttggctcatatttaatgaaaagcaatgttatgagttatgactgtataattggagctagatattatggagtgggaaatgagtatcaaggtgtggcaatcggtagtgcaatatttacatttgcaattttacttacatataaaaatataccaaagtggtctataatagttttttctttggttatcttaattacaagtgcatctccaattatgggagcaaatgttggaagtgctatttctgaatgtgttgcatttttactatttatactattgatatataatgtgaagatagacttcaaaaaaattgtattattaggtatagcagtattatttgtattaggagtttttgtagcaatagatatgattttgggaagtaattcacatttaggtatgtttgtaaaagaaatttactttaatggaccaggagaaataatacaaacatttagtagaaagatagagatgaatttaaagctagctcaaaccagtgcatgggtaaatatactgttaactggaataggtgtaattttagttcttatgattaatcagattagatactttaagcaactgatggatgagtatccaattgtatttaaaggatttatagcatcaatagcaggatgtttagtaactcttttagtgaatgactctgggattgtgtcatcagctacagcctttatttatgtaattgtacctatgataacattaagtataaatctcacagcattaaaagaataagtactgtatgaataatatgtaaatatgaacacattaatttaacttctttatttacaaaataaagaagaaagtttataaaaaataaattataataaaaaagagtttacctcaaaattgattattctaatcaaattttaaggtaaactttttttattataaagataaataacatataacctcatattttaggtagatttttttcttatatgtttaggagtgcatttaaatttttccttaaaaattctgtaaaataattttgtattagtaaatccatgagcttctaatatactgcataaggtatcatttgtgttaattaagtctttataaatatgagaaatacgcacatcatttaaatactctaagtaagtttgtcccatatactgtttaaattttctacaaaaatattctggctgtaagtgtgctaccttagcgattttgttaatagaaataggcattttgtaattaatctttgtatattctaaaactggttcaaattttgacaaatcaagtactgtttttttcatatttttattacctacagatattttaaagtttgtatataattcaaataaaagttcaaataataagcttgtaaagagcagattagctgcaggaggagagctaagtttaatttctctcatgttttctaatataagtttaactttacctgaattttttttatagttattgtcattggcattaaccttaaagtcaaaatagcaatttttaaaatcagggatatatttgtttagaaaagacaatggtacttgcaataatatagaggtatcttgataagtacatctagttgagtgaataattccagaattaatgaacatacactcattagcttttaaattataagtgtaaccctccatgttaatttgtaaatcaccagaagttatataaattatttctaatgagttatgccaatgatttgctacataactaccactatcatcaaatagtttgaaattaacatctaaattatcaataggttcaattatttcatgtgaaaaattatttctgttcataataatatcctccttataattttaaattataaatagtaaatttataatgttcaatattaaaaagataatatagactaataaattagataataaacatacttaagaaaacggataaaatcaaatataataactgtatattaaaataacttaaaaaaattattttattataagtgcaaaatatacctatttaaataagataagaggggaggattttatgtgtatataaaaggtgtaaatttaggaggttggttagttttagaaaaatggatgacctcaagtttatttgaaggcacagaagctgaagatgaatactatttaccaagacagctttcaagagaggcatatgaatctagaattaagactcatcgtagtgaatacatcacagagagagattttgcaacgattaaatctatgggatttaattcagttcgtataccagtaccatactttatttttggagattgtgaaccattcataggatgtgttaaagaacttgataaagcatttgcttgggcagataagtatgggcttagtatattgatagacttacatacagttccaggaagccaaaatggatttgataatggaggaatatcaggtatatgtagctggtcacaaaatccagaatatgtagcgtttacattaaatgtattagaaagacttgcaaaacgttatgggatgagacatgaattgtatggaatccaaattttaaatgagcctataacagaaagaatgtggaacataatgaatgttccaaatcggtttaaggctgtagataaggagatggcaagggggagtaaacctaattcattagagtttttacgtgatttttatataaaagcatataaggtaatgcgtccttatatgagagaggaaaacgttatagtgtttcatgatgcatttgaattaaaagcatggaaagactttatgagagaggaagaatttaaaaatattgttctagatacacaccaatatttgatgttagctgaatcagatggatgtgaacaaagtattgatagctatctcaaatatattagagaaaattatgctaaagatattttacaaatgcaaaaatattttcctgttatatgtggggagtggagcttatttaattcatatgcttgtggtatagatacaaatggaggtcaatcacctctaaatgggattgaatcaaatatagataaattatcaaaagacgataaaagagaattatataggaagatagcaaaagcacagcttgatgcatggagaaatggaagtggtcactactattggaattataagttattactagatacagttaatgaagaaggttggataggatgggatagttgggacctaggcaaatgtgtagctcaagaatggtatcctatagaatattaaactaaaattggaggaaaagatatgattaaaaaccctatacttccaggttttaatccagatccttgtatttgtagaaagggagatgattattatcttgtagtttcatcttttgaatggtttccaggtatacctgtttatcactctaaagacttaaaaaattgggagttatatactcatattttgacagatgaaacaaaaatagatttgaagaagcttccttcatctaaaggaatttgggcaccttgtttgacttattgtgaagaagaagatttattttacatagtttatggaattatgaactctatgaatgcaagatattttgatgttgataattatttaattacatcaaaagatataaagggagagtggagtgaaccagtatatatacactcatcaggttttgatgcgtctattcttcatgatgatgatggtaaaaagtggattgcatcattagactgggagactagagaaggatatgaaaaacctggtgttatatgtttagtggaatactgtacaaaaaagaaagaaatagtaggatatccaaagagaatatggtcagggggaactgatagaggttgtattgaagcaccacatataacaaagcgtggagattactattatataatgtgtgcagaaggtggaactggatatggtcatagtgtaactatgggaagggctaaaaatatatggagaccttatgaaaaagattcaatgaatccaattgtaacttcaattccaggcgatttttatgaaagacatgaccctgaccatctaaagcctaaatactataatccagaatcaaaacttcaaaaatctggtcatggaagctatatagaaacaacatcaggtgaagtatatttagttcatctaacatctagaccatttgtaccagagttaaggtgtactttaggtagagaaacagctattcaaaaaatgaaatggacaaaggataattggcttcgaatggaagatgaaagtaatttggcaaaagaatacgtatcagaaagtaaactagaagaacatttagtttcatctataccaagttttgatgactttgattcaaatgtattaggtttacagtactatgctcctaggatttcaccattatcatttgcagatgttaagtctagaccaggatatgtaaggattagaggtcaagaatcaagaacatcattaaataaagtaagcatattggcaagaaaattaacttcagtatatgcaagaataaccactaagatggagttttacccagaggtacatcagcatagtgcgggtttgataatgtattatgataatatgaattatataaatttaagaaagtattatagtgaaacattgggtcaaagtgcactatcaataatacatcttgaaaatggagagaagacggaatttttaaatactaggataccaataaaagatataccaatatatcttcgtctgtatatacaaggtcgtaagtcatattttgaatggagttatgatgaaaaaaactaccaaagaataggaaaggtatttgatacaactaagttttcagatgagtactgtaaatatggagaatttacaggtacgtttataggattaacttgtgcagatcgtgtaaagcataaacactatgctgattttgatttttttgaatatatagcagatgaatcaaaagatgtcgattaataaaatcattactaaaattttcagagcaaaggtaaatcttatgctctgaaataagaaacattagaaggcaaatcttacaaaaaggagtatggtattatgaatacagaagttaatgttaaagcaactacgattagatatgaaaagatttcattttttgaaagaatttcttatggttgtggggatttggggtgcaatatcatatactcagctatgtcagcatttttgctgttttattatactaattatgcagatgttagtgcagcagctgtaggtagtattatgcttgtatctaggatactggatgggtttagtgacttaacaatgggaattatagtggatagaactaaatccaaatacggtaaggctaggccttggattttgagaatggcgattccttttgctatagcagcagtattattattttctgttccatcaaatcttggtatcacttctaaattaatttatatttttattacatataacttagtttctactgttatttatacagcaatcaatgtaccctatgcaactctaaattcacttataactcaaaaccagtatgaaagaggagtattaagtatatttagaatgatattagccacttgtggtaccttactaataaatggacttacactacctctagttgaatactttggaaataatttatcagcatggactaaaacattctttgtatttggaatagcatctataatggtattttttataacatttactggaaccaaggaaagagtaaaagcagttaagcaagataggaatgaagtaataccatttaaaataggtattaaatctttatttagaaataagtactggatacaaataacattatgtttagtttgcatatttattgtatttgcgataaatggtggttcatccgtatattatgcaaagtttattttgggagatgaaaaattatttggtcctataaatatggtttcaaatatatcccaaattatagctatgtttatggttgctccttttataaaaaaatttggaaaaagaaatgtattaatagtaggttcaataatattaatatcgtcaaatgttatgtttataatagttggacaaaactatataggagtaatatttgcaagtgctataaagggaataggaagtgctggaatagcatcaacaatgtttgctattgtttcagatactattgaatatggagaatggaagactggatatagaactgaggggcttataaatagtgcatctagttttgggtttaaagtgggaaatggattaggttcagcaatattaggtgcagtattatcaattggtggttatgtaggaacatcagctactcaaagtgatttagctatagtatcaataaaagtatgttttatatacctacctatatttataacaatattacaaattatcataatgtttttttataagcttgataaagaatatagtactatacttaatgaattaaatactaaataatgaaaaagtttcttataaagtcttaagtttaattaaggtctattgtaaatgttccctataaaaactattatatatttatgattattgaagaatttttagagaagcgaataataaaaatataagaagactttaaatgatgaaatggttggtcttttagaaatgatttaataagttatttttatttaaagcattataagtggacaattaatttttaatttatggagatgatatttaacaattagaagtaatatataatatgcgctaagaagcaatttttcaactatttatgaaggtggtggtacaagaaaagtatcaccttttttttgttatacaaaaaaacagttgactttttatatgaaccccttctataatgttactgaaattaagtaaaatgattgaacaaatgtaaagataattgaaaagcttgattttggaggaaatcaaatgaaaaaaattggagacttaagattaatgatgaagtgttgttcactttattacgaagataatttgaatcaacaggaaatagcaaatcaattgggaatatcaagaccaacaatatcaagaatattaaaagaagcttttgaacaaggaatagtaaaaatacagatagttgatgttttgaaaaatgattaccaaaaaatagagagaagtttggagagaaaatataaattaaaagaagtaatagtagtagatgataaacaagatgcactaacacaaaaacaagaactagcaagagctgtatctgaatatttaactagagtagtaaaggaaaatgatataataggtgtttcaataggaacaacactaaaagaaataccaagatatgtggaaaaaagtaactgtaaaaatgttacatttatacctctattaggagggattggagacaatgaaatagatattcatgcaaatcaaatagcagtaagtctagcgagggcttttggaggtgattttaaattattacatgctccagctgttatgtctgacttgtctacaaaagagaaactttgcaaagacgaaaaaattaaagaagtactagatttaatagataaaacaactatagcaattgtgggtataggaaatcctatgagtttaaactcaacaataatggcttctggatacatgaatgaagcagatatagaagatttaaaaaaatacaactcaataggtgcaatttgtttacaagcctttgataaagaaggaaaaacttctatacttgaatttaatcaaagagtattaggagtgaaactggaagatttaaaaaagataaaaagaacaataggtgtcgcttcaggagatgaaaaaatagaggcaataaaggcatcattaaaagcgaaatttataaatagtttagcaattaatcacagtttagcacttaaattattagaagattgtgactaatagaaagatagataaaagttaacaggagggaatgtatatgtcaatatcaaaagaaacattgcttgaaatgtataagagaatgaatcaggctagaaaatttgaagagaaagttagttggttttttgcaagaggtatggttcatggaacaactcacttatctgtaggtcaagaagcgtcaagtgtggcggctgtaatggctttagaaaaaggagatttagtatcattaactcatagaggacatagtcaatttataggaatgggaatagacctaaataaaatgatggctgaacttatgggtaaagaaactggattttgtaagggaaaaggaggctcaatgcatatagcagatattgagtcaggtaacttaggagcaaatggagttgtaggtggaggtcttacaatagctccaggagctgcacttacacaacagtataaaaaaacaggcaaaatagttttatgtagttttggtgatggagcatcaaatgaaggtacttttcatgaaggaataaatttatcttcaatatggaaattgccaataatattttactgtgagaataatttatacggtatgtcaacaagcataaaacgtcatatgaatatagaaagtattgccactagagcagcttcttatggaatagaaggaatatcaatagatggatataacccaatagaagtatacgaaacagtacaaaaagctgctgagaagtgtagaagaggagaaggacctgtattaattgaaagtagaacttatagatggttaggtcattcaaaatcagatgcaaatgtatatagaacaaaagaagaaatagaatcatggaaagcaaaagaccctattgaatttttaaaaaattatcttatagaaaataatctatctaatgaagatgaattagataagattcaagaatttgcaaagcaatcaatagaagatgcagtagagtttgctcaaaatagcccaaatccaaaaatagagtctttattagaggatgtatatgcagactaagaatggtaaaggaggaaaataaaaatgagtacaagggaattaacatatgcacaagcaataaaggaagcaatgtcagaagaaatgagaagagatgaaaatgtaatatttatgggagaagatataggaatatatggaggggcatttggtgtatcagttggtatgatagatgaatttggaccagaaagagtaagggatactcctatatcagaagcagctatagcaggagcggcagcaggtgcagcagcaactggtttaagacctattatggaagtaatgtttatggactttgtaacaatttctatggatgcaattgtaaatcaagcggcaaaaatgagatatatgtttggaggaaaagcacaagttccaatggttgttagatgtccaggtggttctggaactggttcagcagagcaacattcacaaagtttagaagcttggttttgtcatgtaccaggagtaaaagtagttgcaccttctacaccagcagatgctaagggattgttgaaagcagctataagagataataatccagtcatatttgttgagaataaattgttatacagaaaaaaaggttttgtgccagaagatgattatgtaattgaaattggaaaggcagatattaaaagagagggtactgatgttacagtaattacttatggaagaatgttacaaagtgttgaagaagcagcagagactctatcaaaagaaaatataaatgttgaaattatagatttaagaactttatatccattagataaagagactatagtaaagagtgtatgtaaaactgggagagttttaatttgccatgaagcagctaagactggtgggctaggtggagaaatatcagccctgataacagaaagtgaatcatttgattatttagatgctccagtaaaaagaatttgtggaaaagatgtgccaataccatataatccagagttagaaaaagcagttgtcccaagagttgatgaaatagaagaagcaataaaatctttaattgttagataaggagggatagatatggtggcaaataaaataaaagccacaccagcagctagaagtcaggcaagaaaagacaatataaaattagataggctgattggaagtggagaaaatggaaggattcatttagtagatgtgttaaattatttaaaagataataaagcaaatactactcctttagctagaagaatagcagaagatttaaatatagatttagaaactattgtaggtactggatatagtggaaagataagaaagtgtgatgtggaaaaattaactgcaaaagaaactattgtatcaaataatacatctaaatatagtgagaaaaaagagctgaaaattgaaaatgaaaattcaagcatgtttaacacagtagaaggaatatttgaaaagccaaatccaatgagagctactgtagcaaaacgaatgtcagaaagttattttagtgctcctgtatttacattcaatatagaagtagatgctacagaattgaaggtacttagagcaaagttaatcgacacagtaaaagaatcaactggagtaaaattaactatgacagatttaatagtaatggcagtatctaaaatacttccaaatcatcaagccttaaattcagcatggacagatgagggtatatttagatataaagatgtaaatatagctattgcagttggtttagatgaaggcttatatgttccggtagtaaaaaatgcaaacaaaaagtctttaaaagaaatagcaaaagaaagcaaagaacttgcggaaaaagtaaagacagggaaacttatgccagcagaccaagaaggtaatacatttacaataagtaatgttggaatgtatggtataactacatttacacctataataaatatgccttcaagtgcaatcttaggggtaggtgctacacaagataagtttgttccagtaaatggagaggctaaaataaaacctataatgaacttatcattaacatcagaccatagagtaatagatggaacagtagctgcaaaattcttaaaagatttaaaagaattgttagaaaatcctttatcaatgcttgtataggttttgatatttcgttactgatataaatagtttgaatagattatattattataattgtttcagtaaatttaaagcttttatatattaagaattatttttaacagtaactatatgtgaatatgatttgcttaattaaaatatatgaaaataaataggaggagagcctatgtcagtagaagtaataatgccaaaagcaggagtagccatggaagaaggtactatagtatcttggctaaagcaagaaggcgaagaagtaaagattggagaacctatactagaaataacaacagataaagttaatatggagatagagtcagaaggagaaggtacacttgctgtaatcatacataaagaggaaggtgaagtattaccagtatttacagtaataggtgtaatagcagaaaaaggggaaaatcaagaggaagtaaaagctaaatatttatctggaaatgtttcaaaagaagatatagttgaagagaatcaaaatatagaagttaaagaagaaaaaataaacaaaaaagagtgtaatcatgattatgatgtagtggtaataggaggaggacctgggggatatttatcagcattaaaagcagctcttttaggtggaagagttgctttagttgaagaaaatatactaggaggtacttgcttaaatagaggttgtatccctacaaagacttatataaaaacagcagaaatattagaagaaattgaccaattatcaaagagaggtgtaaaagtaactgtagataaagaacaggacattaagaaggccataaaatataaaaatagagtagttaaaaaacttacagctggtgttggcggattattaaaaagtagagatgtagatgtgtttaatcttaaagctagtgttaaagaagagcataaagtaattttatcagatggaaaagttttagatacagaaaatataataattgctacaggttccaaagtaaggatattacctataaaaggaatagaatcaaatttaataataactagtacagaagcattagatttggaaacagtgccagaagaattagtaataattggtggtggagtgattggttgtgaatttgcagagatattcaattcaagaggttctaaagtaactatagtagaaatggaagatagagtaatcccaagaatggataaagagttaagcgaatctttaaaatattctcttagtaaaaaaggtataaatgtattaactaaaaagaaagtttctgaatttaaagaagaaggaaataacatattagtgtgcattgaaggtgaagtgccaataaaagcagatttatgtctatatgctataggaagagaagctaatctttctggcatagaggacttagatattaaaatagataaaggttcaatagttgtaaatagtaaaatggaaacaagtataccaagcatatatgcagtaggtgatgttactggaggtgtaatgttagctcatgctgcttttaaaatgggagaggtagcagcttcaaatgctctaggtgtgaataaagaagttgacttaggtgcattacctagttgtgtttatacaattccagaagtagcatcagttggtattacagaagaggatgctagaaaaaaatataatgtaaaagttggtaagtttaattttgctggaaatggaagagctttagcttctggtcaagaacaaggatatgtgaaagtagtagcagatgctaaatatggagaaattttaggtatacatatgtttggatgtggtgtagcagaacttataaatcatgcagcatcatttaaagcattagagatacctactgatgaagcaagtgagttgatatttggtcatccatgtacttcagaagctttaatggaagctttggcagatgtaaatggagaatgtttacacttacctaaaaaataaatctaaacataaattattaatttaagtctattattaatattaatttatatcataaaattttaaaacacttacttagccataccccttattatgcaaataatttatttgtataataaggggtattttttatggaaaaatatagaatatagaatccttgtagtttttgttgtacaaaaaagatagtaatataaaataacattatcattttagaatgatttcaattgtaattaggaaaagtgatttttttgtttttaaaaaaagtattatttgtaaaatataaaaaaaaatttcttaatatttgaataaaagaatagcttaatttaaatgttattactttataaaaaaataataagtacaaaaaaaacaatatatggcatataagttgctatataaataataaggagggaacaattataaatgaggcaaagaataaaaaacttaattgaaaatgaagataagaaaaatcctttaacagatgaagcgatttcaagtaggttaaatattcgaagagaagatgttacctttttgagaaatgagttaaaaatagaagattcaagacaaagaagaaaagttgttttaattaaagctataaaagatattttaaaagaagaaaaaactataaataaaaatgatataacaagaagattaaacagcattgggtttacagtatcaagatttacagtcatacaatacttaaaagagattcaagattctggtgacctaaaacttgataaagagagtgatgataaaaaagaagaaataatcaataatagagaaaataaagatatagcatttgataaactcataggtagtagtggtagcttaagtacaattataaaactagccaaagcagcaattctttatccacctcatggtcttcatactattattatggggccaactggtgttggaaagagtgagttagcagagtgtatgtataaatttgcagtagaatcatccagattccctaagaatgcaccatttatagtttttaatgcagcagattattcagagaatccacagcttttgctatcacagttatttggacacgttaaaggtgcttttacaggagctgatgagaacaaagaaggattagtatcaaaggcagatggaggaatattgtttatagatgaaatacatagattacctcatgaaggtcaagaaatactatttcaactgattgataaaggtatggtcagaaagttaggagaaacaagactaacacataaaatagatgtaatgattatttcagcaacttctgagccaatagattctcatttacttaatacatttaaaagacgtatacctgtaacaattgaaataccagaattagttgcaagaccattaaatgagaggtttgacattataaataatttcttcttaatagaagctcaaagaatgggagcaaacatacatataaagtcagatgtattaaaagctcttatgctttacgattgtataggtaatgtaggtcaacttagaagtgatattcaagtagcttgtgctaggggactattaaaccaacttacaaacaaactaaaagaagtaaatataagcatatcagatgtacctggatatgtaaaacaaggtcttataaaaatcagaaattgtagaggtaaaatagaaaattatgtagatggggatttaattatagattcaaatcttcaaggtgagatagaaaagaaaaatgaagatatatatacttttccagatgaaatatacaaacttactgaaagaagacatattgatttattggaacaaggtttagattttgatgttataaatagaatcattggaggagaattagaaagttgcattcaaaaatacataaaacaagttaaaaaagtttctattagtaacaatcttccagatataagtccaattgttggaaaatatatcgtagagctaacttatgaagtaatcaaaatagcatcacaatacctaagttcactagaaccgaatctacatttatgtttagcagttcacctaaaagcagcttttgagagattaaaagaaggaaaagtaatatcaaatgctcatttgaaagaaataataggaaattatccactagaatattctgtagcagaaaaggtagctcaatatttaaaggaaagatataatataaacttaccaaaagaagaaataggtataatagcaatatattttaaaatgagtagtagaagagatatgtctgaacaaaaaaagataggtgtacttcttatggctcacggaagagtagcatcttctgtatgtgaggttacaaataaactattaggaattaatcacgcaaggtatttagatatgccatttgagaagaagccggaagaaatgattgaagaagctactacaataataaaagatattgatgaaggtagaggtgtgattatattagtagatatgggttcactttcatattttggagatattatttctggaaagactggaattaatataaggacaatatctagatttgatacattgctttctatagaggttatacgaagagcagttttaccagatttaacaatagacgagatagttgatgaagttaaaggtatagagccacaagtaaaagaaaaggttagtaaatgtaacaatacaaaagtagattttagaaaacctataattttaacattatgtattactggattagggggagcttgtaagataaaaaaaatcctagaggaaaatattaaaagtataactgaaaaggttgatatagaacctataggtatgattgaatatccaagtcttgatttagagataaaacaaataagcaatgataaaaatgtaatcgccatagttggaacaattgaccctcagatagcaaatatccctttttttagtctagtagacataaatgataaagcaaagttaaatcaaataaataacctaattgatacaaatcaaattggtgaaacaaataaaaaatatgaattatcagatttaatacataaagaagatatatttgtggatttacaggttaaatcaaaagaagaagttctaaaatatatgagtaaaaaacttagagagaaaggttatgtgacaaaaaatttctataaaaaagtagtggaaagagataacttatttccaactgaattatcagatgaaatagcaatacctcacacagatggaatagatgtaattaggccagctataagtatagccatcttaaagaagcctattgtgtggagtaaaagtaaagtaaaaataatacttttattagctgtagaccaaaagtgttttaatccattaagcactctactctcatttatagaaacagatgaatttaagaagataaaaaacattaaagatagagattttattagggagatgatattagatggagtcaatgaaaataattagtagcaatttaatttttaaaaatattgaagtgtctaacaatgaagatgcattaaagtttttgggacaacgtttgtttgacgaacagtatgtaaaagaaagctacatacaagctgttgtagcaagagaaaaaaagtatgctacaggattaccaacagaaatatacggagtggcaataccacatacagatatagtacatgtaaatgagccaggaatagcaattggaatactgaataaaccagtaaaatttataatgatgggtacagacgatactgaaattgatgtaaaagttgtatttatgttagcagtgaaagagccacaagaacaattgcaactattagaaaaacttatgactatatttcaagataagaatatactaaataatattgttgacttaagtgaagaaagtgtgagtgatttattaaactctaaattgaaaaattaaacatgtaaagtatattaaaaatgtaaaattaaacatgcaaagtatgttaaaaaatataaaaagattattaaagatttctaactatagatatctttaaaataaaataatttcaatgggggtgactaatgtgactaaaaagatattagttgcatgtggaacaggagtatgtacttcaacaattgctataaacaaattaaagaaagcacttcaagacattggtaaattggatatggttaatattacacaatgtaaagtagtagaagttgcatcaaaagcacctgattatgatttaataatttgtactacacaagtatctagtagtataaaaacaccagtgataaatggattaccttttttaactggtgtcggaatggataaattaatcaatgatgtattagaagagttagaattataattaaaaaaattaaggaacatggtctctaaaatcataagttttagagacttaaaattaaataatggagggtctttatatggagatattaaatttcattgttggtctaggtgcacaagtaatgatgccaataataatatgtatttttggtttgatattaggtacaaaactaggaaaatctttaagagctggtttaactgtgggagttgggtttataggtcttaacactattatagctttgctaacagataatttaggtccagctacacaacaaatggttaagaatttagggctaagtttatcaataatagatgtaggatggccagcagcatcagctatagcttttgcatcaacagtaggggctttaattattccaataggtcttgtggtaaatatagttatgctaattactaatactactcaaactgttgatgtagacatatgggattactggcattttgcttttacaggagctttagtggcaggggctactcaaagtgtaatgtggggagtatttgcagcagtagcaaatatggtaattgtattggtaatggcagatttaactgctccaggtatagaggaatatttaggtatgccaggtatatctcttcctcatggatttacacaggcatttgttccaattgctatagtagtaaataaattattagacctaataccaggtataaataagattgagataaatgctgatacattgcagaaaaaatttggattatttggagaacctttaataatggggtctgtaataggtgtaataattggtattgctgcgaaatatgatataaaaggaatattacaattaggtgtaactatgggagctgtattaatattaattccaaagatggcagcattattaatggaaggattattaccagtatcagaagctgcacaggaatttattgagaagagatttaaaaacagaggcaagatttatataggcttagattcagcagtaggaataggtcatcctgttacattatcagttgcactagtgttggttcctttgactatacttatagcagctatattgccaggaaataaagttttaccatttgcagatttagcagtaattccatttgcacttgtattaatcgtaccaattacaaagggaaatgtgtttagaacattaataataggaataattataattacttctggattattaatcgcaactaacttagctccattatttacccaaatggctttaaatgctagctttaaaatgcctgaaggagcaactatgatttcaagtatttgtgatggtgcgaatccattaagttgggtatttgtaaaagttatgaactataaagttattggaggagtagtttttggagttatagctttaggaatggctatttacaataggaatagaataataaatgaaaataaaaagctatctatagaagaataaggttaaaacaattttattaaggagtgtataggttatgaaaaaatataaatatgattctaaaaggtacttactcagtgttacaataccaggattttttatgattttaatattgatttatgcactgtttaataactatataaattttaatttgaatatatatagtttgttaataattgtctgtacttatggtatattcaatacttttatatcatcaagtaatcctaaaaaaattattattgacagcaaatgtatacattttacctcatttatgactacacataagtatgaaattaaagatatagaaaagataagaataagagaattttataataaaaaaatttatctaaaaattaatgatggagacctttttaaaggtaggtattggataagaacaaatatgtttaataatagtatagcattatatagttatttcattgagttggaagagtgcttatatccagattcactaagatttagaaataaaaaatttgagaataagaatatataaaaataaaaaattgaattgaagcctaacttaatcttttttgataagatataagtttgaactttatactaaatttttagaattttcaatcaagacaataacataatagctaagcaattagaacacaactaagatgtataaggcatgtatatgatgaatgggaggatttaattaatgttattagagaaattaagaaaagaagtattacaagcatctttagaccttttaaactataatttagtgacattaacaggagggaatgtaagtgggagagatgaacaaactggctatatagcaatcaccccaagtggaatggattatagaaatcttacaccaagtgatattgttatagtagatgtagatggaaatattatagatggaaaatggaaagcatcagtggatttatcagaccacttgtatatatataagcatagagaagacataaatagtataattcatacacattctacatactcaagttgttttgctattttaaatgaacctatagaatgcgcaagtacaactcttgcaaatgaagtagggggttcagtaccagttgcaaaattttcaccaccaacatttaaaaagatgggaaaatgtgttattgaagcaattggtgacaaaagagcatgtcttttagcaaatcatggcgtaattgcagttggtccatctgtaggacatgctcttacagccgctgtaatgttagaagattcagcaaaagtatattacttagcaaaatcaattggcacaccagtgctactgcctgatgaagaaattcaaagagcgagagatgtattttttaatgtctatggtcaggataaataaattagataaaattttaaaagtaatatgaaaatatagatattcaatgatattaaggagatttataatgatataataagtttaatagttaagaagtaaaatatgaaatgtaatagtatataaattcatttaagactaaaaataataagataaaataaaaaggagtctgtatttctatgtattacttattaaacaaaagcacaaatccttactttaatttggcattagaagaatatctatttttaaatgataaatataatgatgatattataatcatatggagaaatgaagactccatttttataggtaaaaatcaaaatccatatcaggaagtacatcatgatgttattgaaaagggagaaattcctattttaagaagaatatctggagggggcactgtttatcatgatttaggtaatatcaatatgtcattcatacaaaaagataggcaacttcatgagatagattttttggagcatactaagtttatgcaaaagatgctttcaaccttaggactagatgtatctataactgaaagaaaagatttatttttaaatgggaaaaaaatttcaggctctgcacagtctataaaaagaaaaaattctctttatcatggaactcttctttacgattcagatttaaataaattaactaaatatttaaattcaaataaagcaactgaatcaaatgcaactaaatctgtttcaagtaaagttacaaatattaagtttttactcgaaaaagatataaattactttttagattattgtgttgaatatttaaaatctaatataaagaatataaaagaacttgaattggatgaagaagatattaaaagtgtatacaatataggagaagataaatatagaaagatagagtggacatatggtaaaacgccgaaatttcaagtagtgctaccatttaataatgaaagtaaaataaatatacatgttaacagatggaaagtatcaaaattttttatttcttatgatgataatgtaattaatatggataagttgttagatttgaatttctttaaagaagaaataaaagagagtattttagaaaattatccacattacatagatttaatcaatttaatattttaatataaaacctctaatttgataaaattgtcttatatcaaactagaggtttttaatattcttgcatattaacaaccattacaaaattgtaaaattaaaaacaacactattgaaaaatcaatatatattgtaataaatatatgtgtttttcattagcaaatagacattaactatttatacaactgaaaatttaatatataattaatcagatggttaaaataaaaatattaaaagttttaataaatgatggttaaaaataaaatacgaggtgataccatgtacagtgttataattgttgcagcgggaagcggaaggagaatgaacttagatataaacaaacagttcataaaattaagagaaaaagaaattattgctcatacaattcaagttttttatgaaaatataaatatagatgaaatagtggtatgtataaaaaaagaagaagaggatttttttaaagaaaatataataaataagtataactttaaaaatataaaaatagcatatggcggaaaagaaagacaggactcaatatataatggtttaaaaaaattagatgaaaattgtgatatagtacttatccatgatggagcaagaccatttgtcgaccatagaataatcaacgaatctataaaggtagctaaagaaaaaaaggctgtggttgtaggtgttccagtaagtgatactataaagatagtgtcagatggaacagtacaagaaactccagaaagaaatttgttgtgggcagcacaaacccctcaaacctttgaatataatctcataatagatgcttatgagcaagcatataagaacaattattatggtactgatgattcaatgttggtagaaaatataggtcaaagtgtcactatggtaatgggttcttatgaaaacataaaaataactagtccagaagatttaaatatagcagaacaaatattaaatatggaaaaaagagatgaagttaacagtagaaggagaattatatgagaataggattaggatatgatgtacacaaattaacagagaatagaaaacttataatcggtggtgtagagataccacacgataaaggtttgttgggtcattctgatgctgatgtattgatacatgcaataatggattctattttaggtgctctagcattaggagatattgggaagcatttcccagatacagatgaagaatataagggagcagatagtatgaaattattagaacatgtgtataatctaataacaagtaaaggatataaaattggtaatatagatagtactataattgctcaaagccctaagatggctccatatattgagagtatgagaagtaatatatcaaaagttttaaacacagacattgataatataaacataaaggcaacaacagaagaaggtcttggttttacaggagcaaaacagggaatagcttcacaaagtatttgtttattattgttgacaagtcagaataattaatatattattagtaataagtttaatggatatcaagtaataggcctatatagaatatctataatgtatgaatttaagtgaaattaatataaatataaaattagctatgataaagaaatagtaaaatgatgaaatcttcacagagagaaaacggtggtgagagttttcaagaggaagtctttgaacctgtcttttagcttaaaggtataaaaatctttacggtaggaaccgttatattcccaaaagagagctattcatatagctaactagagtggtaccgcggaaattaaacctttcgtctctatacttgtatagagatgagaggttttttatattttcaggaagttaatattcaggaggaatctattaatgaaaatgtcaaaaatgtttatgccgacattaaaagaaatcccagcagatgctgagattacaagccatcaattaatggttaggtcaggcatgataaaaaaaatgacttcaggtgtttataaccaattaccaatggggttaagagtgttcaaaaaaattgaacaaataattagagaagaattaaataaaaaagattgtcaagaaatactttgtgcagccttacttccttctgaattatggaaagagtctggaaggtggactgctatgggtgaagaaatgtttagactaaaagacagaacagaaagagagtactgtcttgggccaacacatgaagaagcattcactgatataataagacaagaaattacttcatataaacaattgccactgaacttgtaccaaatacaagtaaaatatagagacgagagaagaccaagatttggtgttatgagaactaagacttttacaatgaaggatgcatatagttttgatgtagatgataaaggtttagataagtcatatcaagatatgtttgatgcatatgtaagtatatttgatagatgtggattggagaatagccctgtacaggcagattcaggagctataggaggttctacatcagccgaatttatggttaagtcagaagttggtgaagatgaagttgtattttgtagtggatgtgattatgcagccaatgtagaaagagcagaatcttgtaatctagcatcacaaaaagaagaaatgaaagaattagaagaggttcatacaccaggagcagctacaataaaagagttagaagaatttttaaaaacttctccagataagtttgctaaaactttagtatatgaggcagatggaaaaacagttgtagtcgttgtaagaggagatagagaagttaatgaaatcaaagtatctaatgctataggttctgttatagaatttgctcttgctacagatgatgtagtgagaaaagtaactaatgcagaagtaggatttgcaggtccaataggtataaatgctgactatgtatttatagataaagaaattgttgaacaaagaaacatagttgttggggctaataaaactgagtaccatataaaaaatgctaactatggaagagattttgaaggaatagttggagattttagaaatgttcaagaaggcgaccagtgtatagtatgtggtaagccacttgaaatagctagaggtgttgaagtaggacatatatttaaactaggaactaagtactcagaatctatgaatgcaaacttcatagacaaagatggaaaatcaaagcctatagtaatgggatgttatggaataggtgttgaaagaacagcagcagctataattgaacaacataatgatgagaaaggtataatatggcctttgtcagtagctccataccatgttgtgatagttccagcaaatatgaaaaatgaagaacaaatatcaatagctgaaaatatatataatgatttgcaagctatgggtgtagaagttttattagatgacagagatgaaagaataggtgtcaaattcaatgattcagaattaataggaatacctatgaggattacagtaggtaaaaatattaatgaaggtaaagtagaatttaaacttagacataaagaagataaagagataattgacatagaagaaataaatgaaaaagtaaaggcagagtttatcaggaataatgttaggttaggataataacttaaataagatattgtatagataatcaaagttgtactttatagacaccattttatctatatataaggatataaaatggtgtttttttataaaacaaataaatgaggaggtaattgaaatggcaaaaaatgaaaaacaatttgttgaagaaataacaaagatggaagatgattttccacaatggtacacagatgtaataactaagactgacttagttgattatgcaccagtaaaaggttttatggttgtaaagccatatggatatgcattatgggaaaagatgcaagaatttatggataaaaaatttaaagaaactggacataaaaactgttattttccattattaataccagagagtttattaaacaaagaagcagaacacgttgaaggttttgctccagaagttgcatgggtaacacatggaggaaataaaaaattagaagaaagattatgtgtaagacctacttcagagactataatatgtacaatgtatgcgaaatggttaaaatcatatagagaattaccatatctttataatcaatggtgctcagttgttagatgggaaaaatcaactagacctttcttaagaacatctgagtttttatggcaagaaggtcatacattacatgaaacagcagaagaagcacaagaagaaacaatacaacaattagaagtatataaagcgttatgtgaagaattacttgcaatgccagttgtagctggtcaaaaaagtgaaagtgagaaatttgcaggtggtgaaagaacatatactatagaagctatgatgcatgatggtaaagcattacaatcagggacaagtcacttcctaggtcaacactttactaaggcttttgatattacttttgcagatagagaaggaaatttagctaatccataccatacatcttggggagcatctacaagacttataggtggacttataatgactcatagtgataacagaggtttagtattaccaccaagagtagctccaattcaagttgttatagttcctatagctgctaaaaaaggaaatgtaatggagactgttgataaaatatatgctgatttaaaaactaagggagtagccgtagaagttgatgatagagataactatacaactggatggaaatttaatgagtgggaaatgaaaggtgctccagtaagagttgaaattggaccaaaagatatagaaaataatcaagctatggtatttagaagagatactttagaaaaggattctatgcctttagaaggattagctgatgctatatgtgatttatttgatgttatacacaatgatatgtttgaaaaagcaagaaaacatagagaagacaatacatctatagttgaaaatatggatgagtttagaaaagctttagaagaaaagccaggattcataaagactatgtggtgtggagatgcagaatgtgaagctaagattaaggaagaaacaggagcaactataagatgcttaccttttgaacaagaaaacttaggtcacaagtgtgtgtactgtggaaaagaagcagatagtatggtagtaatggcaaaagcttactaaaatacatttaaataaaaactggggtagaaagtatttaatactttatcccagtttttttgttttttatgagtaataaaatgtatttgtaactatgtcataagataagtcatagatacttatattaaaaagaatataatagagaactatttttaataattacatattaatgaaagcaaaatatttttgttatatagattttcaataaagcaaacaataaatataaatgaatattagtaaggagtgcttttaatttttagaaaataaatgacttaaaagaaagatttatgaaattaaaactaggattttctgatataataaacatgtgtatttttaaataaaaaggatattattattagatttgattaaaaataaacttgcaaaacaatgtactagtttaatattatagttatattgaataaaatatcaggaggaagtaaaaatgaatgtaagagtaaggtttgcaccaagtccaacaggatttgtacatataggtagtttgagaactgctttatataactatttatttgcaaaaaaaatgggtggagaatatatattaagagtggaagatacagaccaaagtagattagtagaaggtgctatagagaatatgcttaatgctatgaaatgggctggtgtcaaccatagtgaaggtgttatattagatgatagtggaaaagtagtacaaaaaggagaatatggtccatatattcaatctcaaagattagatatataccaagaatatataaagcaacttttagatagtggaaaagcttattattgtttctgtacaaaagaaagactggatgaagtaagagatgctcaaagagcagcaggagaaacagctaaatatgatggtcattgtaagaatctttctaaagaagaagtagaagcgaatataaaagcaggaataccatatgttataagattaagattgccagagaatcatacaattaagtttacagacttagttagaggagatatggaatttaatactaatgacctagatgaccaagtattaatgaaaacagatggatttccaacttatcattttgcagtagttgttgatgactatttgatgaaaattacacatgttataagaggagaagaatgggtatcatctactccaaaacatgtttatttatatgaagcttttggatgggaagcacctgtatttgtgcatttaccaaatatacttaataaagaaaagaaaaaattaagtaaaagacaaggtgatgtagctgttgaagactttaagaaaaaaggatatttaccagagggattagtaaactatgtagcattagttggttggtctcctgaagataatcaagaattgtttacaatggaggaattagaaaaagccttctctgtagaaagagtatctaaaagtggtggagtatttgatactgaaaaattaaattgggttaatcagcactatataaaagatggtgatgatgcttatctaacagacttagcaataccatttttagtagaagatggatttataacagaagaagaagctactaataaatatgatttcttaaagagtatgatatcagtacttaaagagaaattacaatatgtaaaagaaattactgaacatgcaagtatattttttggagataaaatagaggtagaaactgaagagggaagagagttcttaagattagaacatatacctactttaatagatgctttgagagaaaaaatagaaaaaacagaggtattaaatgctgagtttgttcaagctatgcttaaagaaatacaaaaagagtacaaaataaaagggaaaaatttatttatgggctcaagaataattttgacagggcaaatgcatggtccagatttaccaaaagtaatggaagttttaggaaaagaaacttgcttaaatagaatagcttatgtaaaaaataatatattatagtcataaaagtccgctaatttagaagcggactttttttgtgttagtatttggtgaaaatatctgcttaagaaaatgaaggtatttaaggtaataaatttaatatataaaaagcaaagcaaaaatataaataaaatatgaataataaactaataaaatattaagcatagaagaagggaatctattattttagtttgatttaattattaagggggtaattactatgtatagtaatattgatgatgttaaaaaggaattaaaggagctatgcttagaatatgttacaattttagaaaaattaaaagatgaaaaaatgattacagaagaaacttttgaaaagtgctcttctcaaaaaaaaatatttttagaagaacaatagaggatggtaatagtattattattatgtagtttgaaagatagtacgaaaaatgatagtaatactattatttattgcaattttcaactataatataatatataatgttaagaagataatttataaaaatacagtgaggtgatgagtgtgaaagtttataatacattgactagaacaaaagaagaatttgttccattagaagaaggaaaggtaaaaatgtatgtgtgtggtccaacagtttataactatatacacataggtaatgcaagaccatttataatatttgatactctaagaaggtatttagagtatagaggatacgatgtaacttatgtacaaaactttacagatgttgatgataagattataaatagaagtcatgaggagggaatatctcctgaagaagttgcggctaagtatataaaagaatattttgtagactgtgatgggctagggataaaaagagctactgttcatcctcaggttacagataatatacaacagattatagagtttataaaagagttggaagataagggatatgcatatgcagtaaatggtgatgtatattttgatacaaataaatttgaaggttatggaaaactttcaggtcaaaaacaagaagatttagaggcaggggctagaattgaggttaatgaccaaaaaagacatcctatggactttgttctttggaaggcaaaaaaagaaggtgagccaggatgggatagcccttggggagaaggtagaccaggatggcatatagaatgttctgttatgtctaagagatatttaggtgaaacaattgatatacatgcaggtgggcaagatttaacattcccacatcatgaaaatgaaatagctcaaagtgaagctagaagtggaaaaatattctcaaaatactggatgcataatggatatataaatataaatgatgaaaagatgagtaaatcaaaaggtaatttctttacagtaagagatatatcaaaattatatgatttagagatagtaagatttttcatgttatcagcacattatagaaatccagtaaactttagtgatgagatgttaaatcaagctaaagcaggtcttgaaagactatataatactaaagaaaaattagaatttacgctaagtaatttagtagaatctcctttaacagaaaaagaagtagagcttgttaaagaattagatgactttagacaaaaattcatagatgctatggatgatgatgttaatacagcagacgcagtaagtgtaatatttgaattagctaagttaataaattctaatgtagatgaaaattcttctttggagtttgctaaaaaatgcttagatgaatttaatgaacttacaggagtattaaatattgtaaataagaaaaaggatactgtattagataaagacattgaagaattgatacaaaaaagaactgatgcaaagaaaaataaagagtttcaattagctgatgatattagacaacaattactagatatgggaattgtattagaagacacaagacaaggtgttaagtggaaaaggatataaaaatggaaaaaactgaattagttactatgtcaccattagttttagcatacttaggtgatacagtgtatgagacatatataagagaatatttaattagacagaatacacaaagaaaagttaatgatttgcataaactagctataaagtatgtaaaagctaaagctcaggcaactataattcatgaaattgaaattgagttaactgaagaagagagtaaaatttataaaaggggaagaaatcaaaagtcaaatacttctcctaagaatgcagatattatagactacaaacatgcaactgggtttgaggcattagtgggatatttgtatttaaataatgaaatagagagacttcaatatattatcaataaaggaatcaaaattattgaaagagatatgtaaatattaaagagtgttgtcttaataataagtaataaggcaacactttttttataactaatgtataataaatatatagaaattagtaatgagaaaggataagaaagttatgaaagtaaaattaatatcacatacacctgaaccagaaaaagtaatagctatggcagctaagctatgttattcaccagttgggacagacgaaatagaaaaagatttctaaaatatattaaagagcattcctataacaaatactatggcggttggaatctatgagaagttatagatatagaattatgtaaattatttggaaaaaacaggtttgaaaattagccatgttggtatttctaggttacttaaggaagatcaaacataaataagctgagttgtcttaggtgcactatgtacaacattagaatgtgaagttgaagatttattacttcaaacgaacgatggtactaagaaaaacaatgatgaaatgattaattaataataaaggtaaggaggtagtatatgagtttagcagataaaatttttattgatatgtgtaataatattcttgaaaatggagtatcatcagatggagaggtagttagagcaaaatgggatgatggccagcctgctcatacaataaagaagttttgtgtagtaaataggtatgatctttcaaaagaattcccaatacttacactaagaccaacaaacttaaaagcagcaatagatgaattactttggatatggcaaaaaaaatctaataatataaatgatttgaatagccgtatttgggatagctgggctgatgaaacaggttcaatagggaaagcttatggataccaaattggacagaaacataaatacaaagaaggagaatttgaccaaatagatagagtgatttatgacttgaaatataatccttatagtaggagaattataactaatatatataatcataatgatttaaatgaaatgaatttatatccttgtgcatatagtatgacatttaatgtaactggaaatagattgaatgcaatattaaatcaaagatcaaatgatattttggtagctaataattggaatgtaactcagtatgcaattttagttcacatgttagcacaaataagtgatttggaagtaggcgaattggttcatgttatagcggatgcacatatatatgatagacatattcctctagttaaagagcttattaatagagaatcttatgatgcaccaaaattaataataaatccaaacataaagaatttctatgactttagagttgaggactttacattagaaaattataaaagtgggccacaaatcaaaaagattcctgtggcaatttagaaggagttatttatgaaagttatagtagctgtagatttaaattggggaattggttatggtggaaagttactacagtcgattcctgaagatatgaaattttttaaagaaaaaactgtaggtaatgtagttgtaatggggagagaaacctttaaatcattaccaggaaaaaaagcattaaaagatagagtgaatatagtcttgactagaagtaaatcttttaatgatgatagattgattgtttgtaattctatagatgaaactcttaaggaactacaaaaatatgaaaatgataaaatttttataataggtggagaaacagtatataaacaatttttaccttattgtaatgaactatatgtaacaaaaatacagaagacatatgaggcggatagatttttccctaatatagatattatgtcaaactgggatttgattaaagaaagtgaagtaaaagaatataacaatataagatatgttttttcaacatatataaataatagtttataggtttgtataggagagaaatttaatttatgaaaaaggatatatttgtaaatagagtttctaatgctttagaaaatgatagaggcgcagtttttgtaggtagtggtatatcgtttagttcgactgaagttgattggtttaaattactggagccattagtaaatgaacttgatataacattagacaataaaagtgatgatttacctatgattgctcagtacatagtaaataattattcaggaaatagagggcctttagtaaacgaaatatcaaaaacatttaatagaaagtttaaactaaacaagtatcataagtatttagcaacaactaaactttcaacaatatggacaactaattatgatatgttgttagaagatgcattttatgattttgatacatcggttaaagtaagtgatgattctattacaaggaatagactagaatatgatgtggaaattataaaaatgcatggatgtatttctagatccgattggaatgaaatagttataactcaagaagattatgatgatttttcaataaataaaccagctatatctcaaagattaagtgaagatttaataaataagtcttttctatttattggatatagctatagagatccaaatataagaaatataatgataaatgctagaaggctaagtaaaaaacatactcaacaacattatataattttaaaaaagttaaaagatagtgatagtaatattacgcaagatgatgtagtaagacaagaactttggtgcaatgatttaaaacgtttgggaatttcaactttatttatagatgaatactcagagttagaggaacttttaagagagataagtcaaaaatcaagaggtaaaacagtatatgtgacaggttctcataaagaaagcaatatgaatgcaagaaaattaggaaccaagctagcaaaacataaagatattactttactaagtggtcaatcatctggtattggctcagaggtagttgctgcgtttactgaagagtgtattaagagtaaagaagatattataaatagaatgaaaatatttcctaatccatattcagctgatgaaaaatactctgatgatattactttaataccagatttaaagaaatgtagaactaaaatgttgaattcaacacaagttgtagttgtatttagtggaggtataggtactgaagcagagatagatgttgctataaaacaaaactgtaatataattcctgttataacatgtaaagaggatagagagaatccagctataaaaaaaatcttaaactatagtgataatatgaaaaatatagaaataaaagatgctacctattataataaaatagtagatgaagatggtgttgtaacaatggaggaaatttatatatgcatatcaaaaataatgaattaaaacatgacattattaaattgaaaaaaagaaatggatttattgaagttggaaaagataaaaaaacgttggtaaactgtttaattggagcgaatgaattagaggattacaaatatgaaataaaaaaaatagattgtatacttaatatatcagaaaaaccagatatagtttcagatttaagtactaaaagaagaaaaataagtgaatctatatggtataagatagttaaagatacacctttcgtatctgctacactgcccatatacttagttagtaaaaataataataaaatagatagtaatgaattattagatataattattgagcagatggaaaatggagttgggatgataacgattcatccaacagcaaataaacaaatttttgaggattctaagaatagaatggtacctgtcacatctagaggtggaggtatggtaatacaagatttaatctcaaaaaatttttcagaagataatgtgtatttgaaaatattgccagaaattataaagtatgctcaaaaacataatgtttgtatcagtctaggtgcaacatttagatcaggaaacatatttgattctaatgatagagcacagataacagaaattaagagtcaaatagaattagctaagaggatatataaaagtaatgtcggggttattattgaatcaccaggtcattcaagaccaagtgacataattaaaatatcgtcaatattaaaaaaagaaggtttcccaattatgccactaggaccaataccaacagatattgcaataggaatggatcatatcgctgcagctattggtgctacaattatgggtatagaaggatgtgcaaatataatatcaactgtcacacgagaagaacatactggagggagaccttctattgaatccacagttgaatctataagaacagcaaaaatagctgctcatattattgatatacatcaaatgaatgatattaacttagatatgagtgtatctaagtctagagctaaatctaacacctgtatatttgggaaagatacaagatattgtgacagatgtagagaactgtgtcctttgtgcattagataaaaattatattcaagttaattcaataaaaaagattggataaaaatacatcgtatagctagtttttcacaacagagtcaaagatatgtcaaattagagcaatttgaatacataattcctccagaaatagaaaaaatagaaaaagcaaaagagttatttataaattcaatgaaaaaataccaagaggattatgataaattagtagagatactatttgaaaatcattataacaaactaataaaaggtggtaaaaacgagaaaacatcaaaaagacaagttgagaagaaagcaatagaagatgctagatacgtatttccaaatgcgtgtgaaacaaagatggtatttactataaatgctagaagtttgtttaatttctttgaacatagatgttatgaaaatgggagttgtctagaaggaactatgacttgtggagatatagttcaagttagaaaaaaatttaagaacttgtaggaggtgaataatttggcgagtatagaaggaagaaatccggtaatagaagcaataaaaagtgacagagaaatagataaaatattaattgcaaattcagctaaagaaggttcaattaagaaaataataggaatggctaaagataagaatataattattcagtatgttgataaacataagctagatgaagtaagtacaagtcattcacatcaaggtgtaatagcttatgcaagtgagtataagtattatgaattagatgagctaatagatttagcaaagaataaagatgaagacccatttttcattatattagatgagataacagacccacataatttgggttcaataataaggacagcagatgcagtaggagcacatggagttatcattccaaaaagaaggtctgtacacataactcctgtagttgccaaagcatctgctggagcagtagaatatatgccagtttgcaaggtaaccaatatagttaatacaataaaaagactcaaagaagaagggctgtggattgctgcagctgatatggatggagaaactttttataaacaaaatcttactggtcctcttggtgtagtaattggaagtgaaggttttggaatatctagattggttaaacaaaactgtgactttatagtaaaaatgccaatgataggtaatgttacatctttaaatgcatctgtagcaggtggaatacttttatatgagatattcagacaaagactggataaaagtaaataggcatgaaaaaaaatataaatcattacttaataatagatggctacaatattataaatgcgtgggacaatttgaaagaactggctaaagaggacttagaagattctcgagaaaagcttattgatgacattatagaattttctgagtttatgggttataagactataatagtttttgatgcttataatgttaaaaattctcgagaaaaagttgaaaaaagaaaacacataacaatagtttatacaagagaacaccaaacagcagatagttatatagagaaatttataacttctttatcaaagtatgatgatgtaaaagtagccactaatgactatgcagaacagcaaatgattttaggaaaaggtgctactagaatgtctgcaagagaattaaagttagagttagatcgttccaagaataaaatgaaggaaaaaaatatcggtttgaggaaaaaaattcagcgaaattggttggaggaaaggttagataaagaaacattgtcgaaacttgagaacattcgtagaaagcgttgaaattactaggttctttagactataatatacctataaatttgttttatatatgggggagatttacatgttggtagcaaaagaaaaaagttatgagttagtggacaattgtcagcaggatgagtataacattgtattaagagcaagtgaaggggataaaatagcactagagtacattattactaaatacagaaattttgtaaaggcaaaagcaaagtcatattttttaattggagcagataaagaagatataatacaagaaggaatgataggcctttataaggcagttagagattttgatggaagtaagaccaattcatttaaatgttttgcggagatatgtataacaagacaaataataactgctataaaaactgcaacaagacaaaaacatatacctttaaattcatatgtttctttgaataaaccaatatatgatgaagagtcagacagaacacttttagatattatagctacaagtatagtaacagatccagaagagcttataattagtaaagaagagttaaaaaatatagaatcaaaaatgaacgaattgttaagtgacttggaattagaagtactagaattatatttaaatggaaagtcataccagtttatagcggacaagcttaaaagagatgtaaagtcaatagataacgctttacaaagggttaagagaaaattagaaaaacatcttgaaaacagaaatgattaatagtaaaatacttaccataagcttattgtgagcaaaattaatttatatcgaaagataagggaggaaattcaaaatggctaaagctaaatacgaaagaacaaaacctcatgttaatatagggacaataggacacgtagaccacggtaaaactacattaacagcagcaataacaaaaacattatatgacagatatcaattaggagaagcagtagatttcgcaaacatagataaagctccagaagaaagagaaagaggaatcacaatatcaacagcacacgttgagtatgaaacaccaaatagacactatgcacacgttgactgcccaggacatgctgactacgttaagaacatgataacaggagcagcacaaatggacggagcaatattagtttgttcagcaacagatggaccaatgccacaaacaagagagcatatactattatcaagacaagttggagtaccatatatagtagtattcttaaacaagtgtgacatggtagatgatgaagagttattagagttagtagagatggaagtaagagatttattaacagaatatgatttcccaggagatgacactccaatagtaagaggttcagcattaatggcattagaagatccaaagagcgagtggggagataagatagtagaattattcgagcaaatagatgagtatataccagctccagagagagatacagataagccattcttaatgccagtagaggatgtattctcaatcacaggaagaggaacagttgcaacaggaagagtggaaagaggagtactaaaagtacaagacgaagtagaattagtaggattaacagaagcaccaagaaaagtagtagtaacaggagtagagatgttcagaaaattattagaccaagcacaagcaggggataatataggagcattattaagaggagtacaaagaaacgagatagaaagaggacaagtactagcaaagactggatcagtaaaggcacacacaaagtttacagcagaagtatatgtacttaaaaaagaagagggtggaagacatacaccattctttgatggatatagaccacaattctatttcagaacaacagacgtaacaggagcttgtaagttaccagaaggaatagagatggtaatgcctggagataacgtaacaatggaagtagacttaataaactcaatagttgtagaagagggattaagattctcaataagagaaggtggaagaacagtagcttcaggagttgttgctacaataatagagtaattctttactaaactgatggattaaaaggaataacaaaaagaggggttaggctcctctttttttaacatagaaatacaaaaacattgacacagcataggattttgtgataacttatacaaggtaatgattataggaagttaataatatcttgaatactgtagatttttaataaatacatattttaaagatattatattcacatatattaacaatatatattattgtattacaaagttggaggtgtatcagatgagagttaaagtaactttagcatgtacagagtgtaagcaaagaaactacaacactactaagaataagaaaaataatccagacagaatagaattacaaaaatattgtagattctgtaaaaagcatacaactcataaagaaacaaaatagttttttataaggatgtgagtatggaatggctgcccaaaaaaatgacggtgcaaaaactaaaaaaaggtttagtttatttggatatttaaaagaaactaagcaagaattaaaaagagttacatggccgacaaaaaaggaactgtttaaaaacacaagtatagttttaactgtagttatttcatgcactatattagtatggggtatagacactatattatctggtgcactagcgttattactaaaatagacgaaaagaggtaagttaaatgtcagaattacaagaagcaagttggtatgtagttcatacctattcgggacatgaaaataaagttaaagctacaattgagaaagcagttaaaacaagaggtatggaagactgcataagacaagtagttgttccaacagaagaggtagtggaaactactaaaactggaaaagaaaaaactagacaacgtaaagtttatccaagttatgtcttggttaaaatgataataactgatgaatcttggtatgtagtaagaaatactaagggagttacaggtttcgttggacctggttcaaaaccagtaccattaagtgaagatgaagtcaaagctatggggatagatacaacagaccctaaagtagtaaatagcgatgttgattttgaaataggagacacagtaaaagtatctcaaggaccatttagtggacaaataggtaacatagaagaaattgacttagaaaatagagaagtcaaagtatgcataaatgcatttggtaaaaggactctatttgtaatagagcttgaaggtatagaaaaaatctaatactatatagaaaaatctgaggaggtgcgctcaaaatggctaaaaaagttataggtcaaataaaattacaaatacctgcaggaaaggctactccagcgccaccagttggaccagcattaggacaacatggtgttaatataatgggattcacaaaagaatttaatgctaaaactgcagatcaagctggaatgataataccagttgttataactgtatatcaagatagatcattcagttttataacaaaaactccaccagctgcagttttaattaaaaaagcattaaacttaaaatcaggttctggagaaccaaacaaaaagaaagttgctaaaatgacttcagctcaagtaagagaaatagctgagttaaaaatgcctgacttaaatgctgcatcagtagaagctgctatgagtatgatagctggtactgctagaagcatgggtgttgtaatcgaagactaattaaaagatacactttttttataaagtgggaggcgagaagccgaaattaaccacaaggaggaaaataaaatggctaaaaaaggtaaaagatatgcaggtgcattacaaaaagtagatagaactaaattttatgatgcatcagaagcattaacattagtttcagatatagctggagctaaatttgatgagacagtagaagcacacattaaattaggtgttgactcaagacatgctgaccaacaagtaagaggtgcagttgtattacctcatggaactggtaaaacaaaaagagttttagtttttgctaaaggtgaaaaagctaaagaagctgaacaagctggtgctgactttgtaggagctgaagaattagttcaaaaaatacaaggtgaaaactggtttgactttgatatagtagttgctactccagatatgatgggtgtagtaggtagattaggtagagtattaggacctaaaggtttaatgccaaaccctaaatcaggaacagttacatttgatgtagctaaagctatagatgaaataaaagctggtaaagttgaatacagattagacaaaactaacataatacacgttccagtaggaaaagtatcatttggtggagaaaaattaactgaaaactttactgcattaatggatgctataataaaagctaaaccagctgctgctaaaggacaatatttaagaagtataacagtagcttcttcaatgggacctggagttaaaataaacccagcaagaacagctgaataataaaactgttgacacaggttgacaaaaatgttattatatcacttgtcaatgtaaaaaagaatagatttgccgtagatagtgggtgcgaaagcttaatatcccgccgaggttttagataaattgagattactaaagcttttgatgtctacttttggcaacaaaagctttttataatgttgcggtaaatattaagcctatttggtgaaggaggtgcacatctatatgagaaaagctatagaaattaaatcagaagttgtttctgagatagttgaaaagttacaaaaatcttctgctgctgttgttgtagattacaaaggattaacagttgaagaagtaactgagttaagaaaacaaatgagagaagctggtgtagattacaaagtatacaaaaatactttagttagaagagcagctaaagaagttggtatagagcaatttaatgatgaattattagttggaactaatgccatagcatttggatatgatgatccagttgctccagctagaatattaaaaggattcatggattctcatccaaaaatgaaattaaagatgggtattgtggaaggtgcattctatgatgaatctaagattgttgaaatggctaacataccatcaagagaagttcttatcgctaaattacttggtagcttaaaagctccagtatcaaacttcgcatacttaatagatgcaatagcgaaaaaggcagaaggtcaagaagaagcttaattgcttaactaaaaaattataaatattaatttgaaataaaattcggaggtgctaaaaatgacaatagaacaaatattagaagctatagaaaatatgaaagttttagaattaaatgaattagttaaagctgctgaagaaaaattcggtgtatcagcttcagctccagtaatggtagctggtgcagctgctggtggaccagctgctgaagaaaaaactgagtttgatgtagtattaactgacgttggttcttcaaaagttggagttataaaagcagttagagaaataacaggattaggattaaaagaagctaaagaagtagttgacaatgctcctaagacagttaaagaaggagcttctaaagaagaagctgatcaaataaaagagaaattagaagctgctggagctaaagtagaagttaagtagtttctttaaaaagatacccattgggtatctttttttatttataaaaaactataaagaaagtatttggaattataaagaaagtgtttttataaaataaaaaaaatttatataatagtactaaattaagggtatcatatatggtgtaatggtattttaatttaacattattatcaaattaaaatataaacaattgttgtaatgtctgtatataaagtatataattaaactaaaatgtaaaattttacattttagtttaaaaaaatacacgagtgttttataaataaaatgtaataaataattaattaacaaatataaattttaaaataagttagatatttagaaaaatcgaaatttgtaggatttaaaggacatattcaaggaggagttaataatggaaaaattacaaggaaaaattgcagtagttactgcagcaacaaaaggtattggattagcatcagcagagatattagcaaaaaatggagcaactgtgtacttagcagctcgttcagaagaattagctaatgaagttataaataaaataagtgcagaaggtggttgtgctaagtttgtttactttaatgctcgtgaagaagagacctttacctcaatgatagaagaggtagttaaaaaagaaggtaagatagatatacttgtaaacaattttggttcaacaaacccttctcttgacaaagaccttgtaactggggatacagataatttctttgacacagtaaatactaatttaaaaagtgtgtatttaccatgtaaagcagcaattcctcatatgataaagaatggaaaaggaagtatagtaaatatatcaagtataggttcagtattacctgatttatctagaatagcttactgtgtatcaaaagcagcaatcaactcattaactcaaaacatagctacacaatatgctaaagacaatgttagatgtaatgctgtacttccagggcttattgcaactaaagcagcattagacaatatgtctccagagttcataaaagaatttttaaagcatgttcctttaaatcgtataggggaaccagatgatatagcaaaagctgttctattctatgctagtgatgactcatcatttataacaggggatttacttgaagttgcaggaggatttggtttacctactccacaatttgcagataatatattaggataattaaattactaatatgcaatgaaagcttatgcattagttatagtagaaatgatatttttataaaggccatagatataatttatattggaaaggtttgaggttcaaaattccaagttaaatttatttatggtctttattttgtatattttaataaattgtatatatttgtataaatgtaattatttacaatcattttaatatggaattataattaaataggggggatggtacttgtataaaattttttatagaaaattagacctataaatgaaaaatatggattttatattggaaaattgtacataatacataatatatgcttaaaataatttacaaaaaatcaaaaataatgcatagtttacatataagataaaaaatatattgaaaaatacttgacattatgctaaaattattagatgcgttagaatgaactattgttttatttttaattattgagaggtgaaaagtgaatgccacatcctgtcacgataggtaaaagaactagaatgagcttttctaaaattaaggaaatagctgatgtgccaaatcttatagaaattcaagtagattcctatgagtggtttttaaaagaaggtttaaaagaagtgtttgatgatatttcaccaatagaagattatactggtaatcttatattggaatttgtcgactattctctagatgataaaccaaagtacgatatagaagagtgtaaagagagagatgctacatattgtgcacctctaaaggttaaggtaagacttataaataaagaaacaggtgagataaaagaacaagaagtgtttatgggtgacttccctttaatgacagaaagaggaactttcgttataaatggagcagaaagagttatagtaagtcaattagttagatctcctggtgtttactatgcggaagaaagagataaaacaggtaagagattgatttcatctactgtaattcctaatagaggagcatggttagaatatgaaacagattctaatgatgtaatatctgtaagagttgatagaacaagaaaacaaccagttacagttttacttagagctttaggaataggaacagatgcagagataattgaccttttaggagaagatgagagattatctgctacattagaaaaagataatactaagacagtagaagaaggtcttgtagagatatacaaaaaattaagaccaggtgaacctcctactgtagaaagtgcatcatctttattaaatgctttattctttgacccaaaaagatatgacctagcaaaagttggtagatataaattcaataagaaacttgctttatgttatagaataatgaataaaatttcagcagaagacataataaatccagaaactggagaagtatttgtaaaagctggagaaaaaataagctatgatttggctaaagccatacaaaatgcaggtataaatgtagtaaatctactaatggatgatgataaaaaagttagagttataggaaataattttgtggatattaagtctcacattgattttgacatagatgatttaaacataaaagaaaaagtacattatccaactttaaaagaaattttagatggatatagtgatgaagaagaaataaaagaggctataaaatcaagaattaaagaacttataccaaaacatatattattagatgatataatagcttcaataagttatgagttcaatatattctataatataggaaatattgatgatatagatcacctaggaaacagaagaataagatctgtaggtgaattgttacaaaatcaagttagaattggtctttcaagaatggaaagagttataaaagaaagaatgacggttcaagatatggaagctataacgcctcaagcgttagttaacataagaccagtttcagctgcaataaaagaattttttggtagttctcagttatctcagttcatggatcaaacaaatcctctatctgagttaacgcataagagaagattatcagcccttgggcctggaggtctttcaagagaaagagctggattcgaagtgcgtgacgttcaccattcacactatggtagaatgtgtccaatagagactccagagggaccaaatatcggtcttataaactctctaggaacttatgcaaaaataaatgaatttggatttatagaatcaccatatagaaaatttgataaagaaacatcaacagttactgatgaaatacattatttaactgctgacgaagaagatttattcgtaagagctcaggcaaatgagccattaacagaagatggtaaattcgtaaaccatagagttgtttgtagaactgtaaatggtgctgttgaaatggttcctgaaagtagagtagattacatggatatatctcctaagcaggttgtatctgttgccactgctatgatacctttcttagaaaatgatgatgccaaccgtgcccttatgggagcgaacatgcagcgtcaggcagtgcctctagttagaagagaagcaccaattataggaactggtatagaatacagagcagcaaaagactctggagcagttgttgttgctagaaattctggtatagcagaaagagtaacagcagatgaaataattataaaaagagaagatggaaacagagatagatataatctacttaagtttaaacgttcaaactcaggtacttgtataaatcaaacacctataataaataagggtgaccagataataaaaggtgatgttatagcagatggtccagcaactgatttaggagaagttgcacttggaagaaactgtcttatagcattcatgacttgggaaggttataactacgaggatgctatattaataaatgaaagattagttaaagaagatagattatcaacaattcatatagaagaatatgaatgtgaagctagagatacaaaactagggccagaggaaataactagagatatacctaatgttggagatagtgcaatcaaaaacttagatgatagaggtataataagaataggtgcagaagtagactcaggtgatatattagttggtaaggtaactccaaaaggagaaactgaacttactgctgaggaaagattacttcgtgcgatattcggagaaaaagccagggaagttagagatacttcacttaaagtacctcatggtgaatctggtataatagttgatgtaaaagtatttactagagaaaatggagatgatttatctccaggagtaaatgaattagtaagatgttatatagctaaaaagagaaagataaaagttggagataagatggctggtcgtcatggtaataaaggggttatctcgagagtattacctgaagaagatatgccattcatggaaaatggaacgccattagatataatacttaacccacaaggtataccatcacgtatgaacatcggtcaggttctagaagttcatttaggacttgctgctaagacattaggatggtatgtagcaacatcagtattcgatggtgctaatgagtatgacataatggatgctcttgaagaagctggatatcctagagatggtaaattaactttatatgatggtagaacaggtcaatcttttgacaatagaataactgttggatatatgtattacttgaaactacatcacttagtagatgaaaaactacatgcaagaagtactggaccatactcattagttactcaacagccactaggtggtaaagcacaatttggtggacaaagatttggagagatggaggtttgggctctagaagcatatggagcggctcacatacttcaagagatacttactgttaagtctgatgatgttgtaggtcgtgttagaacttatgaagctatagttaaaggtgaaaacatacctgagccaggaatcccagaatcatttaaggttcttataaaggaacttcaaagtttatgcttagatgtaaaagtattgacagatgaagaccaagaaatagaagtaagagaatctgtagatgaagatgatacgataggtgaatttgagctagacgttgtaaatcacatgggagaagttgaagaaagtaatataatagaagaaattgaagatgattttgtggaagccacagaagatgaggatatagagaatttagaagaattcactgaagatgatttatttgaagaagaaatagattttgaaagtgatgactttgatatgtaaatttaattaatgtaaatctcaaatagaagggagagaactccttgtttgaattaaacaatttcgagtcgataaaaatagcattggcttctccagaaaaaataagacaatggtctagaggagaagttaaaaagccagaaactataaattaccgtactttaaagccagaaaaagatggtcttttctgtgaaaggatatttggaccacaaaaagactgggagtgtcattgtggtaaatatagaagagttagatataaaggtgtagtttgtgatagatgtggagtagaagtaactaaatcaaaagtaagaagagagagaatgggacatatagagctagctgctcctatgtctcacatctggtacttcaaaggtataccaagtagaatgggacttttacttgatatgtcaccaagatcgttagaaaaaatactatatttcgcctcatatgtagtagttgatccaggtgaaactggattgaatgaaaaacagttacttacagaaaaagaatacagaactgctcttgaaaagtatggatatacttttactgtgggtatgggtgctgaagctgtaaaaacattactacaaaatatagatttagaacaacaaagtaaagacttaagagcggaattaaaagatagtacaggacaaaagaaagtaagaacaattagaagattagaagttgtagaagcatttaaaaaatctggaaataaaccagaatggatgattttagatgcaataccagtaataccgccagatttaagaccaatggtacaacttgatggtggaagatttgcaacttcagacctaaatgatttatacagaagagttataaatagaaataatagacttaaaagactattagagcttggagctccagatataattgtaagaaatgaaaaaagaatgcttcaagaagctgttgatgcattgatagataatggtagaagaggtagacctgtaacaggacctggaaatagaccacttaaatctttatcagatatgttaaaaggtaagcaaggtcgtttccgtcaaaacttacttggtaagcgtgttgactactcaggacgttctgttatagttgttggaccagaacttaaattttatcaatgtggacttccaaagaagatggcattagaattattcaagccatttgttatggataaattagttaaagaaggttatgcacataatataaaaagtgcgaaatctatagtagaaaaagttaagccagaagtttgggatgttttagaagatgttataaaaagtcatccagttcttcttaaccgtgcaccgactctacatagattaggtatacaagcatttgaaccaatcttagttgaaggtaaggctataaaactacatcctcttgtatgtacagcttataatgcagactttgatggtgaccaaatggcagtccatgtacctttatcagtagaagcacaagcagaagcaagattcttaatgctttctgtaaataatatacttgctcctaaagatggttcacctataactactccatctcaggatatggttttaggttgctattatctaacaatagaagcccaagatggagctaaaggaacaggtatggtatttaaagactttaatgaactattacttgcttattacaataaatcagttcatctacatgcattagtgaaactgaaggtaacacttgaagatggaagaagttcattggttgaaagtactgttggtagatttatatttaatgaaaatatacctcaagacttaggttttgtagatagaaaagaaaatccatttgcacttgaagttgatttcttagcagataaaaaatctcttggtaaaataatagataaatgctttagaaaacacggaaatacagaaacagctgaattactagattatataaaagctctaggatttaaatattctacattaggtggtataacagttgctgttgatgatatgagtgtcccagaagaaaagaaagtatttatagctgaggcagaagctaaagttgataagtatgaaaaagcatacagaagaggtctaatctctgatgaagaaagatatgaaaaagttatagagacatggacagaaacaactgataaagttactgatgctcttatgggtggactagatagattaaataatatatatataatggcacattcaggagccagaggttctaaaaaccaaattagacagctggcaggtatgcgtggtcttatggcaaatgcatctggtaaaacagtcgagataccagttaaatctaatttccgtgaaggtttatcagtactagaatactttacatcttcacatggtgccagaaaaggtcttgccgatacagctatacgtacagctgaatctggatatttaacaagaagacttgttgatgtaagtcaagatgttattgtaagggaaatagattgtggaacagaagatactacagagatttatgctataaaagaaggaaatgaagttatagaagagatatatgatagaattgtaggaagatatactatagaccctatattaaatcctgaaactggagaagttctagttgaggctgattcaatgatacaagaagatgaagcagaaactatagtagctttagggattgaaaaaattaggataagaacagttcttaactgtaaaactaatcatggagtttgttctaagtgttatggtagaaacttggcaacaggaaaagaagttaatataggtgaagcagttggtataatagcagctcaatctatcggtgagccgggtactcagcttacaatgcgtacattccatactggaggagttgcaggagctgatataactcaaggtctaccaagggttgaagaattatttgaagctagaaaaccaaaaggattagctgtaataactgaagtatctggtagagttgaaattgatgaaacaggaaagagaaaagaagtaaatgtaataccagaagaaggcgagactcaaacatatgtaattccatatggttctagattaaaagttaagcaaggtcaaatgctagaggctggagaccctctaacacaaggatttataaatcctcatgatatagtaagagtaaatggtgttaagggagttcaagaatatatagttaaagaagttcaaagagtgtatagacttcaaggggttgatgttaatgataagcatatagaagttatagtaagacaaatgctatctaaagtaaaagttgaagacccaggagatacagatttattgccaggtggatatgaagatgtattaacattcaatgaatgtaataaagatgctatagataaaggtctaagaccagcagttgctaaaagagttttacttggtataactaaagcatctcttgcaactgattcattcttatcagcagcttctttccaagaaacaacaagagtattaacagaggcagcaataaaaggtaaagaagaccacttaataggacttaaagaaaatgttatattaggtaagttaataccagcaggaacaggaatgaagaaatatagaaatatagctgttgaaaaaattgaagattaatagcatatagagtaaagaaatcttgacaaccattatttgtggtgttaaaatagtaaagtgtgttgtttaaaagtacactaagggcttgaacaagttcttagtgacttttagatggcaataaatgagaactaaaaagcatcaagctagaaaagtgctaatatcacatatttatgtgttatagacattaaattgtaagtaacgaatgttacaatcagtcagtatgaatattcatattgatgtagttggcggtcactgataagatcgaaaatttggaaggaggtgcagatgatgccaacaattaaccaattagttcgtaaaagtagaaaagcgctagagaagaaatctactgctccagcattacaaaaaggttacaactctttaaataagaaagtaactgacgctagtgccccacaaaaaagaggggtttgtacttcagtaaaaacagttactcctaagaagcctaactcagctttaagaaaagttgccagagttagattaactaatggtatagaagtttctgcttatataccaggagaaggacacaacttacaagagcatagtgttgttcttataagaggaggaagagtaaaagaccttccaggggttagataccatatactaagaggtactctagatacagcaggtgttgataagagaagacaatcaagatctaaatacggtgcgaagagacctaaagaagctaaaaaataaaacaattaatgattgattatagttcggtgctttaaatatatatatatttacggcatcacggcattaaatgatttatgtcgagtacctatgatttaagttaaataattaaggagggaagcgaaatgccaagaaaaggtaatattccaaaaagagaagttttaccagatcctatgtatgggagtaaggtagttactaaattaataaataatctaatggtagacggaaaaaaaggaaagtctcaaagaatagtttatgatgctttcgcaattgttgctgaaaagacaggagaagaagctttagaagtatttaataaagcaatggataatataatgcctgttttagaagtaaaagcaagaagagttggtggggcaaattaccaagtgccaatcgaagttagacctgaaagaagacaaacattaggtttaagatggctagtaaaatatactagagctcgtggagaaaaaggaatggttgaaaagctagctaaagagataatggacgcagctaacaacactggagcttcagttaagaaaaaagaagatactcataaaatggcagaagctaataaagcatttgctcattacagatggtaggatatatagatatcttataaattcaaggatatcataaggaggataaccatggctagaaagtttcctttggaaaaaactaggaatataggaatcatggctcatatagatgcaggaaagactactactacagaaagaatcctgttttatactgggcaaactcataaaataggagaaactcatgaaggagcttctcaaatggactggatggagcaagaaaaggaaagaggtataacaataacttctgccgctactactgcttcatggaaagaccatagaataaacataatagatactcctggacacgtggacttcacagttgaggttgaaagatctctaagagttcttgatggttcagttgctgtattctgtgcaaaaggtggggttgagcctcaatctgaaaatgtatggagacaagctgaaacttatggagtacctagaatagcttttataaacaaaatggatatattaggtgcagatttctacaatgttataagcatgatgaaatctagattaaattctaatgcagttcctatgcaattaccaataggtaaagaagattcatttataggtataatagacttattaaaaatggatgctgttatatacaaagacgacctaggggttgaaatggaagaaacagatataccagaagatatgaaagaattagctgctgagtggagagaaaaattagttgaatcagtagctgaaactgatgaagaattaatgatgaaataccttgaaggtgaagaacttactatagatgaattaaaagttgctataagaaaagctactatagcttgtgaaatgaacccagttttctgtggtacagcttatagaaacaaaggtgttcagttagtaatagatgcagttttagattacttaccagcaccaactgatataccagctataaaaggtatattagcagatggagaagaagctgaaagacattcttctgatgaagagccattctctgcattagcattcaaaataatgactgacccattcgttggaaaactagcgttcttcagagtttattctggaacattagaatcaggttcttatgttttaaatgcaactaagaataagagagaaagaattggtcgtatattacaaatgcatgctaatacaagagaagaaataactaaagtgtatgctggagatatagcagcagcagtaggattaaaagatactactactggagacacattatgtgaccctgctaatccaataatacttgaatctatggaattccctgagccagttatatctgttgctatagaaccaagttctaaagcagctcaagaaaaaatgggtatagctcttcaaaaattagctgaagaagacccaactttcacagttaagactgaccaagaaacaggacaaactataatatctggtatgggtgaattacacttagagataatagtagatagattattaagagaatttaaagtagaagctaaagttggtgcaccacaagttgcatatagagagactataactcaaccagttgatgttgaatacaagtactctaagcaatcaggtggtagaggacaatacggtcacgttaagattagagttgctcctcaagagccaggtgaaggatacaagttcacaaacaaaactgttggtggatcagtaccaaaagaatatgttggtccagttgacatgggtatacaaggagctatgcaatctggtatagttgctggatatccagttgtagacgttgctgttgagttatatgatggttcttaccatgaggttgactcttctgagatggcgtttaagatggctggttcaatggcattcaaagatgctatgaagaaaggtaatgcagttcttttagagccttacttcaaagtagaagttgttactccagaagattacatgggagatgttatgggtgacttaaactcaagaagaggattaatccaaggtatggaagctagaagtggtgcacaagttataaatgcattcgttccactttcagaaatgtttggatactcaacagacctaagatcttcaactcaaggtcgtgcaacttacacaatgatattcgatcactatgagcaagttccagcttcagttgctaagaaaatagctgaaggaaaataatttaaaaataattaataatataaatataaaaaataatcagctagatgagatatatctcatctagcacaagataaagggaggaaattcaaaatggctaaagctaaatacgaaagaacaaaacctcatgttaatatagggacaataggacacgtagaccacggtaaaactacattaacagcagcaataacaaaaacattatatgacagatatcaattaggagaagcagtagatttcgcaaacatagataaagctccagaagaaagagaaagaggaatcacaatatcaacagcacacgttgagtatgaaacaccaaatagacactatgcacacgttgactgcccaggacatgctgactacgttaagaacatgataacaggagcagcacaaatggacggagcaatattagtttgttcagcaacagatggaccaatgccacaaacaagagagcatatactattatcaagacaagttggagtaccatatatagtagtattcttaaacaagtgtgacatggtagatgatgaagagttattagagttagtagagatggaagtaagagatttattaacagaatatgatttcccaggagatgacactccaatagtaagaggttcagcattaatggcattagaagatccaaagagcgagtggggagataagatagtagaattattcgagcaaatagatgagtatataccagctccagagagagatacagataagccattcttaatgccagtagaggatgtattctcaatcacaggaagaggaacagttgcaacaggaagagtggaaagaggagtactaaaagtacaagacgaagtagaattagtaggattaacagaagcaccaagaaaagtagtagtaacaggagtagagatgttcagaaaattattagaccaagcacaagcaggggataatataggagcattattaagaggagtacaaagaaacgagatagaaagaggacaagtactagcaaagactggatcagtaaaggcacacacaaagtttacagcagaagtatatgtacttaaaaaagaagagggtggaagacatacaccattctttgatggatatagaccacaattctatttcagaacaacagacgtaacaggagcttgtaagttaccagaaggaatagagatggtaatgcctggagataacgtaacaatggaagtagacttaataaactcaatagttgtagaagagggattaagattctcaataagagaaggtggaagaacagtagcttcaggagttgttgctacaataatagagtaattctttactaaactaatggatttaatataaaaaaaagaggggggtaactcctctcttttttgttttttgttgacaagtagcgctaaagcatatatactaaactagtgccttgagacagattaacaatcaagtttaaggttatgatgttgtaatagaaaataaaattgaaaaaaacagaaaaaaaacttgaaaaaatgtaacagatgatataaaatataatagtgtgcttgagagattaagaaaataataattaaatcctagtgaaatacgaactgatatcgatttaaaagttacaacacacccggagcagtgtatcggtattggttgtacgcaacttgaaaattaaacacgtgataaaggagggaaaacaaaatggctaagaatgaaaaaataagaataagattaaaatcatatgatcacaaattattagatttttcagcaggtaaaatagttgaaactgctaaaaaggctggatcacaagtttcaggacctgtgcctctaccaacagaaaaacaagttgtaactatattaagagctgtacataagtacaaagactctagagaacaatttgaaataagaactcataaaagactaatcgacatagctaatccaacacctaagacagttgactcattaatgagattagacttaccagcaggtgtagatatagaaataaaattataagaacccctaagatattatcctatagatgattatcttagaatgattactctaaaagatgtaatccgctgtaagaattataggaggtgctaatatgaaaggaatattaggcaaaaaagttggtatgactcaaatattcactgataaaggtgtagttatacctgtaacagctgttgaagcagggcctatggtcgttactcaaataaaaacagttgataaagatggatacaatgctatacaaataggttttgaagatgctaaagaaaaagctttaaacaaacctaaaaaaggacatttagctgctgctaatgttttaaagaaacatttaaaagaatttagagtagattctgtagaaggatacacagtaggacaagaaataaaagctgatgtatttgaagcaggtgcaaaaatagatgttactggaataagtaaaggtaagggattccaaggtccaataaaaagacatggacaaagtagaggtcctgaaactcatggttctagataccacagaagaccaggttcaatgggagcttgttcttacccaggtagagtatttaaaaacaaaaaattagctggacatatgggaagcgtaaaggtaacagttcaaaacttagaggttgttaaagtagatgctgacaagaaccttatattagttaaaggagctataccaggagctaaaggttcagtagtaactataaaagaagctataaaggtttctaaataatgactaacctagagaaaggaggaataacaatgccaaaattaaatgtactaaatgttagtggacaaaacgttggagaaatagaattatcagattctatatttggcgtagaagttaatggacatgttttatacgaagttgtaaaaaatcaattagcaaataagagacaaggaactcaatctgctaaaactagagcagaagttagaggtggcggaagaaaaccttggaaacaaaaaggaacaggtagagcaagacaaggttctacaagatctgtacaatgggtaggtggaggagttgcttttgcacctaaaccaagaagctacaaatatacattacctaagaaggtaagaagattagctatgaagagtgctttatcttcaaaagttcaaaatagtgaagttatagtattagatgcattaaacatggatgctcctaagactaaagaatttgctcaaatattaaacaatataaatgctgctaaaaaagctttagtagttatagctgacaaaaacgataacgtaataaaatcagctagaaatatagaaggtgttcaaactgcattagttaatactatgaatgtatatgatatattaaaatacgattcatttataataactacagatgctgttaaaaaagtggaggaggtgtacgcataatgactaatccacatgatgtaataataagaccagttgtaactgagcacagtatggctgaaatgggtgaaaaaaaatacacttttgttgtggctaaagatgcgaacaaaactgaaataaaaaaagcagtagaaaaagtattcggagttagtgttgataaagtaaatactttaaactacgatggaaaagttaaaagaatgggtagaactcaaggaagaacagcaagctttaagaaagcagtagttaaattaactgctgatagtaaagaaatagaattcttccaaggaatgtagtattataacaaacgaaggagggaaaacagatggctataaaaaagtttagaccaacttctcctgccttaagacaaatgacagttttagtttctgatgaaataacatgtaatcaaccagaaaaatctcttttagttaacttaaagaaaaatgctggtagaaacgtacatggtagaataactgttcgtcatagaggtggaggacaaaaaagaaaatatagaataatagattttaaaagagataaagatggtatacctgctaaggttgctactatagaatatgatccaaacagaactgcaaatatcgcattattaaactatgctgatggagaaaaaagatatatattagctccagttggaattaacgttggagatactatattatcaggattaggtgctgatataaaaccaggaaactgtttagcattaaaagatatgccagttggtactatcattcataatatagaattaaagccaggaaaaggagctcaattagttagatctgctggagtttctgcacaattaatggctaaagaaggaaaaaatgctttattaagattaccatcaggtgagatgagattagtaagcataaactgtaaagctactataggtcaagttggaaatatagagcatggtaacgtagttatcggtaaagcaggtagaaaaagacatatgggaataagacctactgtaagaggttctgtaatgaaccctaatgaccatccacacggtggaggggaaggtagatctccaataggtagaccatctcctgttactccatggggtaaaccagctcttggatacaaaactagaaagaaaaataaagcttcaaataaactaatagtatcaagaagaactaagtagtaaatttatttttgctcggaaaggaggaatataaatgtcaagatcaactaaaaaagggccttttgtccatgcaagacttttaaagaagatagaagctatgaatgctagtggaaataaagaagttataaaaacttggtcaagatcttcaactgtatttccacaaatggtagaaaacactatagctgttcatgatggaagaaaacatgttccagtatatataacagaagatatggttggacataaattaggtgagttcgttcctactagaactttcaaaggacataaggatgacgaaaaatctaataagagaaaataattaaattatgactaagaaaggaggaataacaatggaagcaaaagctactgctaaatacgtacgtgtatcaccaagaaaagcaggccaaatatgtgaccttgttagaggaaagaatgttgatgaagcattagcaatattaaagtttactccaagaggagcagcttcaataatagctaaggttgtaaaatcagctaaagctaacgcagaaaacaatcacgaaatggatactgaaaaattatatatagcatcaatagttgctaatcaaggaccaacaatgaagagattcatgcctagagctatgggtcgtgcaactacaataagaaaaagaacttctcatatagaggttgttgttaaagaaaaaaaataattaatagataggagggaaagtaatgggtcaaaaggttaatccacacggcttaagggtcggtgttataaaagattgggactcaagatggttcgctactgataaaaaagagttcggaaacttattattagaagaccataatatacgtaaattcttaaagaaaagattatactcagctggagttgctaagatagaaatagaaagatcagctaacaaaataaaaatggacttacacgttgctaagcctggtgtagttataggaagagctggtgcaggaatcgaagcattaaaagctgaattagaaaaaatgacaaagaaaactataatagttaatatagtagaagtaagaagtacagataaaaatgctcaattagtagctgaaaatatagctttagctatagagagaagggttgctttcagaagagcaatgaaacaagctatacaaagagcaatgaaatctggtgctaaagggataaaagtttctgcttcaggaagattaggtggagctgaaatggctagaactgaaggttatagtgaaggaaatgtgccactacaaactttaagagcagatatagattatggtttcgctgaagctgatacaacttatggaaaaatcggtataaaagtttggatatgtaatggtgaagttttaccaactagagacggtgtaaatccaagagaagaaagcagaaagagcgatagaagagacaacaagagagataatagaagaaacgatagaagaggaaatgacagaagaggaaatgataacagaggaaactacagaggacaaagacctcaaggtggatcaagacctcaaagaactgaaaacaaaggaaattaataatagttaggttcaaggaaggaggaaaaatactcatgttaatgccaaaaagagtaaagcgtcgtagagttcatagaggaagcatggctgggcaagctcataagggtaataaagttacttatggtgagtttggattagtagcattagaagcttcttggataacttctaatcaaatagaagctgccagaatcgcgatgactagatatataaaaagagggggaaaggtttggataaaaatattccctcataaaccagtaacaagaaaaccagcagagactcgtatgggtgcagggaaaggttctccagaatattgggtagctgtagttaagccaggaagagttatgtttgaattagcaggtgtttctgaagataaagcaagagaagctatgagacttgctgcacataaattaccaatcaaatgtaaatttgttaaaaaagaagatttagaagtaaagggtggtgaataggatgaaagctaaagaattaagagatttaacaagcgaagagctaatgaacaaattaaacgacttcaaaagtgaattatttagcttaagattccaattagctactggtcaattagaaaatacagctagaataaagtttgttaagaaggatatagcaaaagttaaaactgttcttgctgaaagaaagttatacgaaactagagcttaatttggaaaggaggctttttaaacatggaaagaggaagaagaaaagttagaataggccgtgttgttagtgataagatggataaaacaatagtagtagctgttgaagaattcgtacgtcatccactatataataaacgtgttaagagaactaagaaattcaaggctcatgatgaaaagaatatatgtaacatcggagatagagttaaaataatggaaactagaccattatctaaagataagagattcagactagttgaagttgttgagaaagttaagtagtttttgaagaaggagggattacgatatgatacaacaagaatcacgtctaagagttgctgataactcaggagctaaagaacttttatgtatacgtgttctaggcggaagtaaaagaagatatggtaacataggcgacgttatagttgctactgttaaaagtgcaacacctggtggagttgtaaaaaaaggtaaggttgttaaagctgttatagtaagaagcaaacaaggcgtaagacgtaatgacggaagctatatatcttttgatgaaaatgctgctgttataataaaggacgataaaactccagtaggaactcgtatattcgggcctgttgctagagagttaagagacaatgaattcatgaaaatagtttctcttgctccagaagtactataattaaggaggtgcaataggacatgatgcgtgttaaaaaaggtgacactgttgtagttatagcaggtaaagataaaggtaaaaaaggttcagttttaaaggtatatcctaaaactagcaaagtgttagttgaaggtgtaaatgtaataactaaacatcaaaaaccaagtgctatgaaccaacaaggtggaataataaataaagaagccccaatacacatatctaatgtaatgccatttgatcctgaaacaggaaaaggcgttagagtaagatatgaagtaaaagatgggaacaaagtaagagtatcagcaaagagcggaaaagaattataataaatattgcttgaaaggagggaccttaaatggcttctagattacaagaaaaatacatgaaagaagttgctcctgctttaatggagaaatttggatacaaaaacgtaatggagatacctaagttaaataaaatagttattaacatgggtataggtgacgctagagaaaatccaaaaggattagaaaaaggcgttgaagaattagaaatgatatcaggacaaaagcctgttataactaaagctagaaaatctgttgctaacttcaaattaagagaaggaatgccaataggaacaaaagttacattaagagctgacaaaatgttctactttatggacaaattagtttcagtttctttaccaagagttagagattttagaggagttaaccctaatgcttttgatggtagaggaaattatgctttaggagttaaagaacaattaatattccctgaaatagaatatgataaaatagataaagtaagaggaatggatataatatttgttactacagcaaaaactgacgaagaagctcgtgaattattaaaattattaggaatgccattttctaagtaagcaaaggagggattcccgtggctagaaaagcgatggttgttaagcaacaaagaaagcaaaagtacgctactagagaatacactagatgtactatatgcggaagaccgcattcagttttgaaaaaatttggtatatgccgtatatgctttagagaattagcttataaaggtcaaatacctggtgttagaaaagcaagctggtagaagcttgattagaatggaaggagggcaacaaaatgacaatgacagatccaattgcagatatgcttactcgtataagaaatgctaatgttgttaagcatgaaactgtagatgttccagcttctaatatgaagaaagaattagctagaatcttattagaagaaggtttcataagaggttatgatgttatagaagatggaaaacaaggtatcataagaatacaattaaagtacggacaagaaggcgaaagagttataacaggtcttaagaaaatatctaagcctggaatgagagtttacgctgctaaccatgagataccaaaagtattaaacggattaggaatatcagttatatctacttcaaaaggaatattaactgacaagcaagctagaaaagaaaatgttggtggagaagtaatctgctacgtttggtaattaatatgaacaatgtaaggaggtgcgaccatgtcaagaataggtgttaagccaataataataccagcaggtgttgaagttactatagctgaaggaaatttagttacagtaaaaggtccaaaaggaactttaactaaacaattaagtgctgagttaaacataaaaaaagaagaaaatacaataatggttgaaagaccaactgataataaaaaacatagatctttacacggactaactagaactttattagataatatggttgtaggtgtaaatactggtttcgaaaagaaattagaattaaaaggtgttggatatagagctcaaaaacaaggaaagaaattagttatgaacttaggtttctctcatccagttgagatggaagatccagaaggaataactgttgaagctccaaaccaaacagagttaatagtaaaaggtatagacaagcaattagtagggaattatgctgctaagataagagcttggagaaagccagagccatacaaaggtaaaggtataaaatacgttgatgaagtaatcagacgtaaagaaggaaaaactggtaaaaaataataccaaaacttaaacgctagaaaggagtgagctaggtgttaaaaaaggctgataaaaatgctaatagacttcaaagacataagagagttcgtagaaaaataagcggtacttctcaaagaccaagattatgtgtatttagaagtgctaacaatatatatgctcaaataatagatgacacaaaaagagtaactctagttgctgcatcttctttagaagcagaagttaagagtgctgtcaatcatacaggaaacaaggaagcagctaagaaagttggagaattagttgctaaaaaagctgttgaaaaaggaatcactgaagttgtatttgacagaggtggatacttatatcatggaagaattcaagaattagctgaaggtgctagagaagctggtcttaagttctaatacgaaggagggaaaaatacatgctacgtcgtaagccgatagatgcaggacaacttgacttacaagaaaaagttgttgaagtaagacgtgttactaaggttgtaaaaggtggtagaaatttcagatttgcagcattagtagttgttggagatgaaaacggacacgttggtataggtgctgggaaagcaatggaagtaccagacgctataaaaaaagcagttgaagatgctaagaaaaatctaatagtagtgccaatagttgggactacaattcctcacgaagtacgcggacactttggtgctggaaatatattaataatgcctgctgtagaaggtacaggagtaatagctgggggacctgctagagccgtacttgagctagctggactaaaagacgttagagctaaatctttagggtctaacaatccaagaaatatggtaaatgctacaatagaaggacttaattctctaaaaacagttgaagatatagctaaacttagaggtaaaaaagttgaagaacttctagggtaaggaggtagtgtaaaatggctaaattacaaataaagttagttagaagtgttataggaactactcctaaccaaaaaaagaatgttgaagcgttaggattaagaaaaagagaacaagttgttgtaaaagaagacaatgctcaaacaagaggtatgataaataaagtaagtcacttattagaagtaactgaaatagctgaataatttttataaagtagtgcaaggaggtgcaatccatgaagttacatgagttaaaacctgctgaaggtgcagtaagagctaagagaagattaggtagaggtactgcaactggacaaggtaaaactgcaggacgtggacaaaaaggtcaatggtctcgttctggtggtggagtaagagtaggatttgaaggtggacaaatgccactagctagaagacttcctaagagaggtttcaataacatatttaagaaagtttacacagaagttaatgttgaagttttaaacagatttgaaaatggaacagaaataactgcagaattattaaaatctactaaaactataagcaaaataggtaaagacggaattaaaatcttaggtgaaggtaatttagagaaagctttaactgttaaagctgctaaatttacagcttcagctcaagaaaaaatagaaaaagctggtggaaaagcagagttagtataataacctgctaatctcctagccagtacaggcggggtgaattagcgtgctgtcaaaattaaaacaagcttggaagattaaagcagtaagaaaaaaagtaatgtatacacttatgatgatcgtgatattcagaataggtactactataccagttccaggcatagacactagtattatacaaaagatggtaggcggcaatagtctactttctctgtataatatgtttactggtggagcatttagtaacttttcactatttgctttaggtataagtccatatatcactgcatcaatcataatacaacttctaacagtaggttttgaaagtttagcagaacttcaaaaatctggtgaagaaggaaagaaaaaaatcaataagtacactaaatatacagcactagctctagcagttgtacaagctttgggaattacattaggaattgtaagaagtgctttaatatcaaatagtgtgttttttatcacaactgttgtaataacattagtttcagcaagtatgttagtaatgtggattggggacaaaattactgaaaaaggaatcggtaatggtagttcagtaataatatttgcaggtataatatcaagaatacctacagatgttattaaaatatcgcaacaagttaaatctggcgaagttgcaccttgggttatagtgattctagctgtagttatattacttacagtaacaggagttacatttatacaagaagcaactagaaagatacctgtacaatatgctaaaagagttgttggaagaaaaatgtatggaggacaaagttctcatataccaatgaaagttaaccagtcaggagttatgcctataatttttgctagttcacttttagctttccctcaaacaatagctatgtttatgggtccaaatgctcaggcttttgttcaaaaatacttaagtatggcaacagaacaaggattttggacatatagatcaattgagattctacttataattttcttctcatatttttatacaactgtatcatttaatacagaagacatatctaaaaatatgaaaaataatggtggatttataccaggtataagaccaggtgagcctactatggattatttaaatagaattttaactagattaactttagctggagctactttcttagcaataattgctatggtgccagctcttacaacacattatatgaaagtaaatatgagtctagctgggacttcattgctaatcgttgttggagttgctttggagcttaagagacagttagagtcaaacttagttatgagaagctatcaaggtttcttaaaataaaatggagatggataatatgagaataatattacttggacctccaggtgctggtaaaggtactcaggcggcaggaatagtagaaaaatacaatatacctcatatatcaacaggagatatattcagaaagaatataaaagagggaacagaacttggaaaaaaagctaaagaatacatggaccaaggtttattagtaccagatgagttaactgtaggtttagttactgatagaatatctcaagaagattgtaaaaatggatttatgttagatggatttccaagaaatgtagcacaaggagaacatttagatatcttcttaaaaaatgctggtatatcactagataaagttgtcaatattgaagttgataagagtatattagtgtctagagcagttggtagaagaatatgtaagtcttgtggagctacttaccatgttgagtttaatcctcctaaagtagaaggtgtatgtgatgtatgccaaggagaattatatcaaagagctgatgataatgaagaaactgtatctaagagaatacaagtttatctagatgaaactaagcctttagtagattattatagcaaacaaggtataatagcagatataaaaggtgatcaagcaatagataaagtatttgaagatattgtcgcagccttaggaagtggaaaataaatgattatcttgaaatcaaaaaaagaaatagaacttttaagagaagcaggtaaaatagttgctgacactcatgaagttttaagaaaagctatttctccgggaatatctactttagaattagataaaatagctgaagagaatataagaaaatacaatgcagagccttcttttaaaggatatggaggttttccaggaagtatatgtgcttctatcaatagagaggtagtacatggtattccaggagaaactatattacaagaaggtgacattgtaagtttggatataggagcctattataaaggatatcatggtgattctgcgaaaactcacggagtaggcatgatatctgaagaagataggaaattgatagaagtaactagagaaagcttctatgaaggaataaaatttgctaaattaggatatagactttcagatatctcacacgcagtacaaacacacgttgagaaacatggtttctcggtagttagagatttagtgggtcatggagttggagcaaatcttcatgaagacccacaagtacctaattatggactcccaggaaaaggaccaagacttagagaaggaatggttattgctatagagccaatggttaatgcaggtcgttatcatgtaaagactctatcagatgggtggacgactgttacaatagatggaaaaaaatcagctcattatgagcatacgatagcaattactgaacatgaacctttgatattgacaaagttgtaatttaaaaagtaggtgaaaaaagtgctatcagataatttaagtataggtcaagttgttaaagtttcattaggacgagataaaggaaatttattctttgtagtcaaaataattaataatgaatatgtattaatagctgatggaaaaaagagaaaacttgacaaacctaagttaaagaaagtgaagcacttaaaaaaatatgattttattaatgatgaagttagaaaaagagtagtatctggacaagagattacagattcttttttaagagctgaacttactaagttaaattagataatttaacttattgaaatggagggctggttagttaatggccaaaaaagatgttatagaattagaaggtacagtttcagaagctttacctaatgctatgttcaaagttaaactagaaaatggacatgagatattatgccacatttctggaaagctaagaatgaacttcataagaattcttgaaggtgacaaggtgaatgttgaactttctccatatgaccttacaagaggaagaattacttggcgtaagaagtagactatattaatatttagtctaaggagggattaataatgaaggttagaccatcagtaaaaccaatatgtgaaaaatgtaaagtaataaaaagaaaaggaaaagtaatggttatctgtgaaaatccaaagcataagcaaaagcaaggataagaaattattactagcattttgttaaattttatagtataatactatattgtgatgttaacaaaagaacgttaaaatcgttgaacaatctggcgtaggattggcatatgatgtgaagttttaaacactaaaaactatgtgtaggaggtgcgatcatggcaagaatagctggggtagatttacctagagaaaaaagagcggagataggcttaacttatatatatggtataggtaaagcaactgctaacgaaatattagctaaggctgagataaatccagatactagaataaaagatttatcagaagatcaagttaatgagttaagaaaagttatagatgacgatttcttagttgaaggtgacttaagaagagaaattgctttaaacataaagagattaagagatataaaatgttatagaggaataagacacgctaaaggtcttccattaagaggacaaagaactaagactaatgctagaactagaaaaggtcctagaaaaacagtatctcgtaaaaagaaaaaataaataaataataactagatgaaggagggaaaaggaaaatggctaaaccaaaaaagaaagttacacgtattagaagaagagaacgtaaaaatatagaacgtggtcatgctcatatacaatcaactttcaataatacaataataactttaactgacgttcacggaaatgctatatcttgggcaagttctggacaattaggattcaaaggatcaagaaaatcaactccatttgcatctcaaatggctgctgaaacagctgcaaaagctgcgatggaacacggactaaaaagtgttgaggtattcgtaaaggggccaggttcaggaagagaagctgcaataagagctttacaagcaactggactagaagtaactatgataaaagacgttactccaatcccacataacggatgcagaccaccaaagagaagaagagtgtaattaataagagtacaataggaggtgtagataaatggcaagatatacaggtgcatcatgtagacaatgccgtagagagggaatgaaattattccttaaaggtgatagatgttatacagacaaatgtgctatagtaaaaagaaactatgctccaggtcaacatggccaaggaagaaagaaagtttctaactatggattacaattaagagaaaaacaaaaagttaaaagaatatatggagttttagagactcaatttagaaatttatatgaacgtgctgaaaatatgcctggtaaagcaggtgagaacttattaagtttattagagagaagattagataatgtagtttacagaatgggactagcatcttctagaaaagaagctagacaattagtgactcatggtcatttcactttaaatggaaataaagtagacataccttcattaatagttaaggttggagatgttatagaagttaaagagaaatcaagatcttctgcaaaattcaaaaatttagtagaagttaactcaagaatagctcctaagtggttagaagctaatgtagaaggaatgacagcaaaagtagttggtgttccaacaagagaagatatagatcttgagatagcagagcacttaatcatagaactttactctaaataataagcacacttttaaaaattattttaaaattttgtttaccctcagtggattactgaattttaaggagggttttgtccatgatagaaatagaaaagccaaaagtagatatagttgagcttagcgaagactatagatatggtaagtttgttatagagcctctagaaagaggatatggaataactataggtaacgcattaagaagaatattattatcatcattaccaggtgtagcagtgaatgctataaaaatcgatggagttcttcatgaattttcaacaatacctggtgttaaagaagatgttactgagataatattaactttaaaagagctttcagcaactatagatggtgaaggaagtagaacacttaaaatagaagctcaaggaccatgctctatcacaggtgcagatataatctgtcctccagatgttgaaatattaagtaaagatttagcaatagctacattagatgataatgctaaacttaatatggagatatttgtagataaaggtagaggttatgtttctgctgaagaaaataaaacagagaatgttccaataggtgttttacctgtggattcaatatatactcctgttgagaaggttagttatcatgtggaaaacacaagagttggtcaaaaaacagattatgataaattagtactagaagtttggactaatggtagtataaatcctcaagagggaatatcattagctgcaaaggtattagttgagcatttaaacttatttatagacttaactgaacatgtaagtagtgttgaaatcatggtagaaaaagaagaagatcaaaaagaaaaagttcttgaaatgactatagaagaattagatttatcagttagatcatataactgtttaaagagagcgggaattaatacagttgaagaattagctaataaatctgaggatgatatgatgaaggttagaaacctaggtaagaagtcattagaagaggtaatacaaaaactagaagaacttggattgggattaaaaccaagtgaagaatagcgagcaaaggagggataagaatggctaagtaccgtaaattaggacgtgaaacagctcacagaaaccttatgttaagaaacttagtaacttgcttactaagaagtggaagaatagaaactacagtgactagagcgaaagaaactcgtagaatggctgaaaagatgataactcttgctaagagaggagatcttcatgctagaagacaagttttagcttatgttatggatgaaacagtagttaataacttattcacagatttagctccaaaatatgctgagagaaatggtggatacactagaataataaaaatagggccaagaaaaggcgatgctgctgaaatggcttttatagaattagtatagtaaggaaaggattaggcttgatggcttaatcttttttttatttttttgactaaggtatgatataataatgtgtaaaatgatttttataagttattgcttactaaaaggagtatgagttaatggataatatagtaaaggtaaataatatttcgtttgagtatattacagatgaagcaaaacttaaagcaatagataatttaagcctagatgttaaaaaaggagaatttgttgcgataataggacataatggttctggtaagtctactttatctaaaaacttaaatgctattcttatgcctactgaaggaaatattcttattgatgatatggatactaaagaagaagaaagattatgggatataagacaaactgcaggcatggtatttcaaaatccagataatcaaatagttgctactatagtagaagaagacgttgcatttggacctgagaacttaggtatagaaccaaaagaaataagacgaattgtagaggagtctttaaaaagtgtaggtatgtatgatttaagagatagacagcctcatttgttatcaggaggtcaaaagcaaagagttgcaatagcaggaattattgctatgaggcctaaatgtataatatttgatgaagcaacagcaatgttagatccatctggaagaaaagaagttatgaaaacaataaaaagacttaataaggaagaaaatataactgttatacatataacgcactttatggaagaagcagtagaagctgatagagttgtagttatggaaaaaggaaagaaaatcttagagggaactcctagagaagtattcagtaaaataaagatgttaaaggaaatcggtttagatgtaccttgtatgacagagttatctagtttattaatagaagaaggtataaatattagtagtgatatattaactgtggatgagatggtgatggaattatgtcaattatagtaaagaatttaacacatatatataatgaagggatgccttttgcaagtaaggcacttgatgatatttcttttgagattaaagatagagattttgttggtcttataggtcatacaggctcaggaaaatctacattaatacaacatttaaatggattactaaagccttcctcaggagaaatatttataaatgattttaatataacagataaaaacttgaatttaactgagattagaaaaagagtaggggttgtatttcaatatccagaataccaattgtttgaagaaacgattgataaagatatagcttttggaccctctaatttaggcttagaggagtctgagatacataacagggtaaaagcatcaatggaagctgtaggacttgattatgagggatttaaagacaaatctccttttgaattatctgggggacaaaagcgtagagtagcaattgctggagttatagccatgaacccagaagttctcatattggatgaaccaactgctggtcttgaccctggtggaagagatgaaatttttaacttaataaaagacttacatgaaaaaaagaatatgactataatactatcatcacatagtatggatgatatggcaaagttagcaaaaactttaattgttatgaatcatggtagcgtagaatttatgggaactcctagagaagtgtttaaatcaaatgctagtaaattaaaagatataggattagatattccacaagttttagagcttgcattgaaattgagagaaaaaggctttgacatcagtgaggatatattgactttagaagaagcaaaacaggaaatattaaaagttgtgagaggacgaggattatgttaaaagatataactatagggcaatactacccaacaagttctgctattcataaattagatccaaggataaagcttgtagcgacaattgtatttatggtatctatatttgtagtaaataaattttggccttatatagtagttttattatgtttattagctatgataaaattggctaatataccagtcaaatatattgttaagggtgttaaacctcttaaatggattattttgtttacatttcttataaatatttttttcttaccaggtgatgaaatatggtcatttggatttttagctattacaaaacagggtctaagacaagcaatttttatggcaataagattaatatttttagtagttggtacatcattgcttactttaacaacttcaccaatagaattaactgatggaatagagagattgttgaatccatttaagaaaattggtttgccagttcatgaacttgcaatgatgatgacaattgctttacgttttattcctacattgttagatgagacagacaaaataatgaaggctcagatgtctagaggtgcagattttgaaagtaagaatcttataaatagagcaaagaatttagtaccacttttggtacctttatttgtaagtgcatttagaagagctgatgaattggctatggccatggaggccagatgttacagaggtggacataataggactaagatgagagagtctgttatatcaagaagggattatatggcatgtgtatttcaggttgtttatctgggagcaattatagctactagatttatagcaatttaattaataagttatagatataatgaggtaaagtatgagaaatataaaaattaaaatccaatacaatggtaagaattattgtggatggcaaaagcaacctgattctttagggatacaaggtacaattgaaagggctatatatgatataacaaaagaagaaaccagtcttatagggtctggtagaactgattcaggagttcatgctattggtcagattgcaaattttaaaattaattcaggtataagtatagaaagtataccaatggcactaaatgccaagttgccaaaagacatatcagttatagaagcatgtgaagtaaatgatgattttcactccagatacagtgcaaaaggtaaaacatataaatatttagtatataatagcaagtttagaaatccaatacttagtgagatatcatatcaagtaaaatatgaacttgattttgataaaatgtgttcagaagcaaaaagtttattaggaacacatgattttaaaggttttatgagttctggttcatctgtaaaagatacagttagaacgatatatgatattgatataagtaaaaaagatgacttgattacttttgagattagtggtaatggttttttatataacatggtgaggattattgttggaacacttgttgatatgggtcgtggcagaattaacgaaccatttttagatataatacaatcaaaaactaggtcaagatgtggacatacagctccagcacaaggattatttctcaaaaaagttcattattaacttgacacaccaggctacatgtattaaaatatatgagaatgtgttaataagtccacttgccccggacttgacataaacggtaaaaaaattttatgaaaagtagttaaggagggacagttatgaaaagttatatagctaagccagctgatgtacaaagaaaatggtacttagttgatgctgaaggaaaaacattaggtcgtttagcaacagaaattgcgacagtattgagaggtaaacataaaccaacatttactcctcacgttgatggtggagattttgttgttgtagtaaatgcagaaaaaatagttttaagtggtaagaaattagatcaaaaatattacagataccatactggttatgtaggtggattaaaagaaatatcttacagagatatgatggataagaaaccagaagaagttatatcacatgctgtaagcggtatgttacctaaaaataaattaagaagcagaatgatgactagattaagagtatttgcaggtgctgagcacactcatgcagctcaaaatccagaagttttaaactttaaataagattaataggtgaaaggaggagtttataatggctaacgttcaatattatggaactggaagaagaaaaagttctgttgctagagtaagactagttgcaggtgaaggaaatatattagtaaatggaagagcattagaaaattattttaattatgagacattaataagagatgttaaacaaccattagttttaactggtaatgaaaataaatatgatgttatagtaaaagttgaaggtggaggattcactggacaagctggagctataagacatggaatatctagagctttattaaaagctgatttagatttaagacctgctttaaagaaagaaggtttcttaactagagatgcaagaatgaaggaaagaaagaaatacggattaaaagcagcaagaagagctccacaattctcaaaaagataattacttatttttttggaaaagcaaaatcctttatttactgttattcagaaagtattggtattttaaaaatgttgggttaagttaattattgatatataataaaataataagatatcttattaggatgtttttcattaagaagaacatcctttttattttgactatttaataaaaaacatatgctaataacatttaaattttatttttataatattgtaatttaaaagtttatataaggttatatattttaagatattatttaacaatataaattctgaatatacgttatcaaagtttataatataaactaagtataatttattgtatagtattgaatgttagataaacatagtgaattaaataggggcagaaatataatatcattacataataatatattaataccaataaataaagatatatcaatattaaaaaaatttaaatgtttgtactaatatatggaatattatagtgtttttataagtatacatatacagggtgatgttgtgagaaagtacataaaacatataatttttagttttgcaatgatatgtctagtagtagtatccatatttgaaattaaaaatatttctgaagatgttatcaagtatatgccagtaacaaacaaaactataattttagatgctggtcatggaggcattgatccaggtgcattaaataaggataagagtacatctgaaaaggatattaacctagcaataacacttaagcttagagagcttatagaatcaagtggtggccttgtaatattaactcgagaagatgacagtagcctttataaagaagaaaataataaaactacaagacaaaaatataatgagaatttgaaaaatagaaaagaaataatatctaattctaatgccaatatgtttgtctctatacatcttaatgcatttgaacaatcaaaatactatggagctcaaactttttatcctaaagacaaacaagacagtaaagaattatcgaagtgtattcaagaagaacttaaaagagtagtagataagacaaacaacagagaagtcaaaccaagggatgatatatatcttttgaaagaaaataatattccatcagtactgatagaatgtggttttttatcaaatgaaaaagagtgtaaactcttaactgatgaaacatatcaagaaaaaatagcatgggcaatctacataggaatacaaaaatatttaagttgaaataagtataaaaataggtctaaatatgtaaatagcttgtattaaagcagttaaaatgcattaatataggctatttttattttgacaaaaaaatatttaaaataaaagttaaaaagttgttgacttagaataatatagatgatattatatatgagtgcccaaaaggagcaccaaaataagacaaaagaactttgaaaattaaacagtaggttaatttataaacaagaaacaaaccataaagccagatattttgataacaatagtatctgagcctgataaacttttatttgagagtttgatcctggctcaggatgaacgctggcggcgtgcctaacacatgcaagttgagcgatttacttcggtaaagagcggcggacgggtgagtaacgcgtgggtaacctaccctgtacacacggataacataccgaaaggtatgctaatacgggataatatatttgagaggcatctcttgaatatcaaaggtgagccagtacaggatggacccgcgtctgattagctagttggtaaggtaacggcttaccaaggcgacgatcagtagccgacctgagagggtgatcggccacattggaactgagacacggtccaaactcctacgggaggcagcagtggggaatattgcacaatgggcgaaagcctgatgcagcaacgccgcgtgagtgatgaaggccttcgggtcgtaaaactctgtcctcaaggaagataatgacggtacttgaggaggaagccccggctaactacgtgccagcagccgcggtaatacgtagggggctagcgttatccggatttactgggcgtaaagggtgcgtaggcggtctttcaagtcaggagtgaaaggctacggctcaaccgtagtaagctcttgaaactgggagacttgagtgcaggagaggagagtggaattcctagtgtagcggtgaaatgcgtagatattaggaggaacaccagttgcgaaggcggctctctggactgtaactgacgctgaggcacgaaagcgtggggagcaaacaggattagataccctggtagtccacgctgtaaacgatgagtactaggtgtcgggggttacccccttcggtgccgcagctaacgcattaagtactccgcctgggaagtacgctcgcaagagtgaaactcaaaggaattgacggggacccgcacaagtagcggagcatgtggtttaattcgaagcaacgcgaagaaccttacctaagcttgacatcccaatgacatctccttaatcggagagttcccttcggggacattggtgacaggtggtgcatggttgtcgtcagctcgtgtcgtgagatgttgggttaagtcccgcaacgagcgcaacccttgtctttagttgccatcattaagttgggcactctagagagactgccagggataacctggaggaaggtggggatgacgtcaaatcatcatgccccttatgcttagggctacacacgtgctacaatgggtagtacagagggttgccaagccgtaaggtggagctaatcccttaaagctactctcagttcggattgtaggctgaaactcgcctacatgaagctggagttactagtaatcgcagatcagaatgctgcggtgaatgcgttcccgggtcttgtacacaccgcccgtcacaccacgggagttggagacgcccgaagccgattatctaaccttttggaagaagtcgtcgaaggtggaatcaataactggggtgaagtcgtaacaaggtagccgtatcggaaggtgcggctggatcacctcctttctaaggagaattgcctactgtttaattttgaaagttctttacgaactttatatatgggggtgtagctcagttgggagagcacttgccttgcaagcaaggggtcaggagttcgactctcctcatctccaccatttaagagtatattacttaaatctttgatttacttagtagcctcttacaatgcacttatagcttaaatttatacaagctttgtgcgttagcactttaagcaacgggatttattcgttggcgacgtgctttagcactttgaaaactgcatatatatttagtgatatgacatctaatttgtaatatataaagctgataactttttaaaattatcgaagttgatagcttctaatctatcaaacctttttaactggtcaagttattaagggtgcagggcggatgccttggcactaggagccgatgaaggacgtgataagctgcgataagcttcggggagttgcacgtaaactttgatccgaagatttccgaatgaggaaactcacttagagtaatgtctaagtatcattaagtgaatacatagcttaatgaggggaactcagggaactgaaacatctaagtacctgaaggaagagaaagaaattcgattccgtaagtagcggcgagcgaacgcggattagcccaaaccaataaagttttctttattggggttgcggacatatcataacgaagaggtatcgtaattgaagaggtttggaaagacccaccacagaaggtaatagtcctgtatgttaaacgagaagacttcagatatgatccagagtaccacgggacacgtgaaaccctgtgggaagcaggagggaccaccctccaaggctaaatactacctagtgaccgatagcgtatagtaccgtgagggaaaggtgaaaagaaccccgggaggggagtgaaatagaacctgaaaccctgcacttacaagctgtggaagcacatttcttgtgtgaccgcgtactttttgtagaacgggccaacgagttacgttaagtagcaaggttaagcacttaaggtgcggagccgtagcgaaagcgagttttaactgagcgttcagttacttgacgtagacccgaaaccgggcgacctacccatgagcaggatgaagcgaaagtaaaatttcgtggaggtccgaacccacgagcgttgaaaagctcggggatgacttgtgggtagcggtgaaattccaatcgagcccggagatagctggttctccccgaaatagctttagggctagcctcaaggtgagagatacggaggtagagcactgaatgtcctagggggtattgcacctaccgaagactatcaaactccgaatgccgtcatcttatacttgggagtcagactgtgggtgataagattcatagtcgaaagggcaacagcccagatcgtcagctaaggtccctaaatgtaagttaagtggtaaaggatgtgggattgcacagacaaccaggatgttggcttagaagcagccactcattcaaagagtgcgtaatagctcactggtcgagtgatcctgcgccgaagatttccggggctaaaacttactaccgaagctacggcatcagtaatgatgggtaggggagcttcccatacgggttgaagcatgaccgtaaggacatgtggacagtatgggagtgagaatgttggcatgagtagcgagatgtgggtgagaatcccacaggccgtaaacccaaggtttccaggggaaggttcgtccgccctgggttagtcgggacctaagctgaggccgaaaggcgtaggtgatggacaacaggttgatattcctgtactaccgataaccgtttgagagaagggatgacacagtaggataagctaagcacactgttggttatgtgtgcccaagcattgaggcagtcaaagtaggcaaatccgctttgataatgctgggatgtgatggggagcgaaatttagtagcgaagtagctgatttcacactgtcaagaaaagtctctatcgaggttaaaggtacccgtaccgcaaaccgacacaggtgggtgaggagagtatcctaaggccagcgagagaactgttgttaaggaactcggcaaaatgaccccgtaacttagggataaggggtgccaccatcaggtggccgcagagaataggcccaagcgactgtttaccaaaaacataggtttctgctaagtcgcaagacgatgtataggagctgacgcctgcccggtgctggaaggttaaggggatctgttagagcaatcgaagcagtgaacttaagccccagtaaacggcggccgtaactataacggtcctaaggtagcgaaattccttgtcgggtaagttccgacccgcacgaaaggcgtaacgatttgggcactgtctcaacaacagactcggtgaaattgtaattccggtgaagatgccggatacctgcgacaggacggaaagaccccatggagctttactgtagcttgacattgggtcttggtactacatgtacaggataggtgggaggctttgaaaccaggacgccagttttggcggagccatccttgggataccacccttgtagtactgggactctaaccataggccatgaatctggtcttgggacactgtcaggtgggcagtttgactggggcggtcgcctcccaaaaggtaacggaggcgctcaaaggttctctcagtacggtcggaaatcgtacgtagagtgtaaaggcaaaagagagcttgattgcaagacatacaggtcgagcaaggatgaaaatcggacttagtgatccggtggttctgcgtggaagggccatcgctcaacggataaaagctaccctggggataacaggcttatctcccccaagagtccacatcgacggggaggtttggcacctcgatgtcggctcatcacatcctggggctgtagtaggtcccaagggttgggctgttcgcccattaaagtggtacgcgagctgggttcagaacgtcgtgagacagttcggtccctatccgtcgcaggcgtaggaaatttgagaagacctgtccttagtacgagaggaccgggatggacgtacctctggtgtaccagttgtcctgccaagggcatggctgggtagctatgtacggaatggataagcgctgaaagcatctaagcgcgaagccaacttcaagataagatttcccaccgcaagggtaagaccccagaaagactatctggttgataggtcgaaggtgtaagtgcagtaatgtatttagcttatcgatactaataggtcgaggacttgaccaatattatttgatgttattcattaagatatatgtgcagtttttagagtgttaactctaaaaaaaaataaaaaaagtattgacaaaaatagtaaaaaatgttaatattatacttgtcctagcaacaagaaaaaaatgtggttataatagcagagaagatacacctgtttccattccgaacacagaagttaagttctctagcgctgatggtacttggtgggaaactgcctgggagagtagggcatagccacgtgaatgttccaaggtagctcaacggtggagcaaccggctgttaaccggtaggctgtgggttcgagccccacccttggagccattatggctcgttggtcaagaggttaagacaccgccctttcacggcggtaacaggggttcaattcccctacgagtcaccatttgtgggatcatagctcagctgggagagcacctgccttacaagcagggggtcacaggttcgagccctgttggtcccaccatttgcggcctggtagttcagttggttagaatgccagcctgtcacgctggaggtcgagggttcgagccccttccaggtcgccaaaataaaaatgctggtgtggctcaacggtagagcagctgacttgtaatcagcaggttgtaggttcgattcctatcaccagctccatgtaaaactaatacggaggatttcccgagcggccaaagggggcagactgtaaatctgttgtcatcgacttcggtggttcgaatccaccatcctccaccaattaaatatgcgggtgtagctcaatggtagagttctggccttccaagccagctgtgagggttcgatccccttcacccgctccaaagaaagcgtgggtgcatagctcagctggatagagcaacgcccttctaaggcgtgtgtccggggttcgaatccctgtgcgctcaccacatatatattggggattagccaagtcggtaaggcacatgactttgactcatgtatgcgtaggttcgagtcctgcatccccagccaaataaaaatatggtctattagctcagtcggtagagcacctgacttttaatcagggtgtcccgcgttcgagtcgcggatagatcaccaatggagaggtgtccgagtggtttaaggagctggtcttgaaaaccagtgacttcgaaaggggccgtgggttcgaatcccaccctctccgccaaaaaaatgactgaatttggagaagtactcaagtggctcaagaggatcccctgctaagggattaggctgggtaaccggtgcgagggttcgaatccctccttctccgccattcaaaaacgaggtgtagcgcagtttggtagcgcacatggtttgggaccatggggccgggggttcgagtcccttcacctcgaccaacttaagcttttagttcagttggttagagtgcccaactcatggctagtaattctagggtttgagtccatgaaggttattcttcataggggtgtagctcagttggtagagcgtcggtctccaaaaccgtgcgccgggggttcgagtccctccacccctgccaaataaaaaggacttgaaaaaagttggattttagagtagtataagatagtaaataagatttcgaggtgtagcgcagtttggtagcgcacatggtttgggaccatggggccgggggttcgagtcccttcacctcgaccaagaaaagggcctatagctcaggtggttagagcgcacgcctgataagcgtgaggtcgctggttcgagtccagctaggcccaccatttgcccagatagctcagtcggtagagcaggggactgaaaatccccgtgtcggtggttcgattccgcctctgggcaccaggaatacggcggtatagcttagttggctagagcgttcggttcatacccgaaaggtcataggttcgactcctattaccgctaccatctaactatatcaataaagaactttgaaaattaaacagtaggttaatttataaaacaagaaacaaaccataaagccagatattttgataacaatagtatctgagcctgataaacttttatttgagagtttgatcctggctcaggatgaacgctggcggcgtgcctaacacatgcaagttgagcgatttacttcggtaaagagcggcggacgggtgagtaacgcgtgggtaacctaccctgtacacacggataacataccgaaaggtatgctaatacgggataatatatttgagaggcatctcttgaatatcaaaggtgagccagtacaggatggacccgcgtctgattagctagttggtaaggtaacggcttaccaaggcgacgatcagtagccgacctgagagggtgatcggccacattggaactgagacacggtccaaactcctacgggaggcagcagtggggaatattgcacaatgggcgaaagcctgatgcagcaacgccgcgtgagtgatgaaggccttcgggtcgtaaaactctgtcctcaaggaagataatgacggtacttgaggaggaagccccggctaactacgtgccagcagccgcggtaatacgtagggggctagcgttatccggatttactgggcgtaaagggtgcgtaggcggtctttcaagtcaggagtgaaaggctacggctcaaccgtagtaagctcttgaaactgggagacttgagtgcaggagaggagagtggaattcctagtgtagcggtgaaatgcgtagatattaggaggaacaccagttgcgaaggcggctctctggactgtaactgacgctgaggcacgaaagcgtggggagcaaacaggattagataccctggtagtccacgctgtaaacgatgagtactaggtgtcgggggttacccccttcggtgccgcagctaacgcattaagtactccgcctgggaagtacgctcgcaagagtgaaactcaaaggaattgacggggacccgcacaagtagcggagcatgtggtttaattcgaagcaacgcgaagaaccttacctaagcttgacatcccaatgacatctccttaatcggagagttcccttcggggacattggtgacaggtggtgcatggttgtcgtcagctcgtgtcgtgagatgttgggttaagtcccgcaacgagcgcaacccttgtctttagttgccatcattaagttgggcactctagagagactgccagggataacctggaggaaggtggggatgacgtcaaatcatcatgccccttatgcttagggctacacacgtgctacaatgggtagtacagagggttgccaagccgtaaggtggagctaatcccttaaagctactctcagttcggattgtaggctgaaactcgcctacatgaagctggagttactagtaatcgcagatcagaatgctgcggtgaatgcgttcccgggtcttgtacacaccgcccgtcacaccacgggagttggagacgcccgaagccgattatctaaccttttggaagaagtcgtcgaaggtggaatcaataactggggtgaagtcgtaacaaggtagccgtatcggaaggtgcggctggatcacctcctttctaaggagaattacctactgtttaattttgagggttcgtttttacgaatactcaaaattagcacttttagcaacagaataaactgaacgcatgtgaagtttgtttgttggcgctgtgcgttagcactttaagcaacggaatttattcgttggcgccgtgctttagcactttgaaaactgcatatatatttagtgatatgacatctaatttgtaatatataaagctgataactttttaaaattatcgaagttgatagcttctaatctatcaaacctttttaactggtcaagttattaagggtgcagggcggatgccttggcactaggagccgatgaaggacgtgataagctgcgataagcttcggggagttgcacgtaaactttgatccgaagatttccgaatgaggaaactcacttagagtaatgtctaagtatcattaagtgaatacatagcttaatgaggggaactcagggaactgaaacatctaagtacctgaaggaagagaaagaaattcgattccgtaagtagcggcgagcgaacgcggattagcccaaaccaataaagttttctttattggggttgcggacatatcataacgaagaggtatcgtaattgaagaggtttggaaagacccaccacagaaggtaatagtcctgtatgttaaacgagaagacttcagatatgatccagagtaccacgggacacgtgaaaccctgtgggaagcaggagggaccaccctccaaggctaaatactacctagtgaccgatagcgtatagtaccgtgagggaaaggtgaaaagaaccccgggaggggagtgaaatagaacctgaaaccctgcacttacaagctgtggaagcacatttcttgtgtgaccgcgtactttttgtagaacgggccaacgagttacgttaagtagcaaggttaagcacttaaggtgcggagccgtagcgaaagcgagttttaactgagcgttcagttacttgacgtagacccgaaaccgggcgacctacccatgagcaggatgaagcgaaagtaaaatttcgtggaggtccgaacccacgagcgttgaaaagctcggggatgacttgtgggtagcggtgaaattccaatcgagcccggagatagctggttctccccgaaatagctttagggctagcctcaaggtgagagatacggaggtagagcactgaatgtcctagggggtattgcacctaccgaagactatcaaactccgaatgccgtcatcttatacttgggagtcagactgtgggtgataagattcatagtcgaaagggcaacagcccagatcgtcagctaaggtccctaaatgtaagttaagtggtaaaggatgtgggattgcacagacaaccaggatgttggcttagaagcagccactcattcaaagagtgcgtaatagctcactggtcgagtgatcctgcgccgaagatttccggggctaaaacttactaccgaagctacggcatcagtaatgatgggtaggggagcttcccatacgggttgaagcatgaccgtaaggacatgtggacagtatgggagtgagaatgttggcatgagtagcgagatgtgggtgagaatcccacaggccgtaaacccaaggtttccaggggaaggttcgtccgccctgggttagtcgggacctaagctgaggccgaaaggcgtaggtgatggacaacaggttgatattcctgtactaccgataaccgtttgagagaagggatgacacagtaggataagctaagcacactgttggttatgtgtgcccaagcattgaggcagtcaaagtaggcaaatccgctttgataatgctgggatgtgatggggagcgaaatttagtagcgaagtagctgatttcacactgtcaagaaaagtctctatcgaggttaaaggtacccgtaccgcaaaccgacacaggtgggtgaggagagtatcctaaggccagcgagagaactgttgttaaggaactcggcaaaatgaccccgtaacttagggataaggggtgccaccatcaggtggccgcagagaataggcccaagcgactgtttaccaaaaacataggtttctgctaagtcgcaagacgatgtataggagctgacgcctgcccggtgctggaaggttaaggggatctgttagagcaatcgaagcagtgaacttaagccccagtaaacggcggccgtaactataacggtcctaaggtagcgaaattccttgtcgggtaagttccgacccgcacgaaaggcgtaacgatttgggcactgtctcaacaacagactcggtgaaattgtaattccggtgaagatgccggatacctgcgacaggacggaaagaccccatggagctttactgtagcttgacattgggtcttggtactacatgtacaggataggtgggaggctttgaaaccaggacgccagttttggcggagccatccttgggataccacccttgtagtactgggactctaaccataggccatgaatctggtcttgggacactgtcaggtgggcagtttgactggggcggtcgcctcccaaaaggtaacggaggcgctcaaaggttctctcagtacggtcggaaatcgtacgtagagtgtaaaggcaaaagagagcttgattgcaagacatacaggtcgagcaaggatgaaaatcggacttagtgatccggtggttctgcgtggaagggccatcgctcaacggataaaagctaccctggggataacaggcttatctcccccaagagtccacatcgacggggaggtttggcacctcgatgtcggctcatcacatcctggggctgtagtaggtcccaagggttgggctgttcgcccattaaagtggtacgcgagctgggttcagaacgtcgtgagacagttcggtccctatccgtcgcaggcgtaggaaatttgagaagacctgtccttagtacgagaggaccgggatggacgtacctctggtgtaccagttgtcctgccaagggcatggctgggtagctatgtacggaatggataagcgctgaaagcatctaagcgcgaagccaacttcaagataagatttcccaccgcaagggtaagactccagaaagactatctggttgataggtcgaaggtgtaagtgcagcaatgtatttagcttatcgatactaataggtcgaggacttgaccaatatttatttgatgttcattcattaagatatatgtgtagtttttagagtgctaactctaaagaaactagtattactaggttctataaacttattaaaaacttaatagaaatattaagcataaagattatgtggttacaatagcagagaggatacacctgttcccattccgaacacagaagttaagctctctagcgctgatggtacttggtgggaaactgcctgggagagtaggacgtagccacgtaatttttttgttataataaatttagaatttaacttatatagtttaatttgataatttgatgaaaaaaataaaagacttactgatttttaaatctataggtcttttattttttatctaacatttaaattaagttgttgaatatatcttatattacttactttatatattaattaccattaatacattatatctaattactattcatctaaattattatgccattattttatatacaaattcttttaatttgtctaatccagataaaaaagtattttcactgcaagcataggatatacgaatatatttatccataccaaatgctatgccaggaacaactgcaacattatattcttctaaaaattgattacaaaattctatagaaaaactatctttatattcaaatttctcagatactttagaaagatctataaatatatagaatgcgccatttggattcacatatcctacattatcaatagagtctagttttgatttaattaaatctcttcttgatttatatgttttaaccatattgtctatgtcaattgagcaatctttcaaggctccataggctatgtattgtgctgttagacttgggtgagatataagatgtccttgtatagaactcattgctttagcaatcgttttattagatgcagtatatcctaatcttaatccagtcattgcagctgacttagaaaaaccatttatagttattgttatatctttagcttcttcgcttaatgatgcaattgatgtaaattcaccagtgtagcatattttttcatatatttcatctgctaaaatatatattttattttgtatgcatacatctactatttctattaattcatcttttgtataaacactaccagtaggatttgaaggattgtttattacaagaatttttgttttatctgttatagatttttcaagttcttcttttgttaacttaaatccattttcttttttagtatcaataaaaactggaacagcattaactaacttaatcatttcaggataactaacccaataaggctttggtaataagacttcatctccttcgtctgttaaagctagtaaagtatttgttattgagttttttgctccacttgatacaactatttcgtctattgaatagttacagttattttcttcaataagttttttacagatttcctctctaagtatttttaatcctggaactaaatcatatttagtgtaatctttatttaaagaatcaataccataagattttgcgttattaggtacattaaaatcgggttctcctatactaagatttattactttaactccattactttccatttctttaactttagaactaatacctattgtgtaggatggtgttataaagtttagtctttttgataacataaaatgcctccttttaaattattatttatattatacgacaaatttaaagaatttacataaggaaatttgtagatatatacattaatatatataatagcctacactttttgcctaaaattagtgtaaaaaaaagagaaaaaaattttaactttcaaagttgttagaaacgctactgttcaaaatatccacatagtatttgcaatgatttgcgcaagtttgactattatgtacaaatttggtaatcttaatatagcaattattaagataatccctttaacttagttgaaggggatttttttagacttaacatactacatatagtggtattgggattaataaaatacaatatatagtaacaggaggtttttttaattggttgaattcgtaaaaaaaagagatggaagagtaattccatttaatgaagatagaataacaagagctatatttttagcagcaacgaatgttgcagaaagagaaggaatagtacctgattataaattatctgagcaattaactcaagaagtaataaagtttttaaatcataaatactcagaatcagttccaagtgttgaagatatacaagattctgtagttaaggttcttatagaaactggccatgcaaaaactagtgaagaatatataatatacagaactgaaagaagtagaataagaaattcaaaaacaagattgatgaaggcaatagaggaaattacctttgaagatgcagaagatgctgatataaaaagagaaaatgcaaatattaatggtaatacagcaatgggaactatgttacaatatggaagcactgtatctaaagaattttgtaaaacacatatattaaaaccagaacattcttttgctcatgataatggagatatacacatacatgatatggattttttaaatatgggaacattaacttgttgtcaaatagatgttaaaaaactattcaatggtggattttcaacaggacatggctttttaagagagccacaagatataataagttatggtgcattagctgcaattgctatacaaagcaatcaaaacgatcaacatggaggtcaaagtataccatttttcgattatggattggctgaaggtgtatataagacatttaagaaattctacataggaaatttagctaaagcattgaagttatttaaaggaattgaaaataatgatgtgataaagaacatagtatataatacagagaaagaaacaaatcaaaaagttggtcttaagagagatgaattgtatctaaacttagaaaaagagaaattaatacagacttttgatatagatgatgaacttgtaaataagatgcaaaactttgcatttgaagaatcgtatagagaaactgataaaaaaacatatcaatctatggaagcatttatacacaatctaaatacaatgcactctagagcaggtgcacaggtaccattttcaagtgtaaacttcggaacagatacttctgaagaaggaagaatggtaactaagaatcttctattatctcaagaaagaggtttaggtaatggagagacaccaatttttccaattttaatatttaaggtcaaagaaggcataaatttaaatcctgaagaccctaattatgatttatttaaattatcatgcagagtatcagctaaaagactatttcctaattttagttttttagatgcgccttttaatgcaaaatattataaaaaaggtgaaccagatacagaggctacatatatgggttgtagaacaagagtacttagtaatgtgtgtggttcagaaacagttagtggtagaggaaacatatcttttactacagtaaatttaccaagattgggtataaaacatggtattataaataatgaaaaggctaatttagatggtttctttgaagaattagatgagaagataaacttaattatagaacaattattggagcgctttgaggttcaaggaaataaaaagatgaagaattttccattcttaatggggcaaggtgtatggaaaggttctgatgatttagtaccagaagatacactaaaagaagtaataaaacaaggaacattgacaattggatttataggtttagcagagtgccttattgctcttataggtaaacatcatggagaaagtaaagaagctcaagaattaggattaaaaatagtgtcacatatgagacataaaatggatgaagcaacggacaaatataaattaaatttctccttaatgggtactccagcagaaggtctttcaggtaggtttactaaaatagataaaaaagtttatggagaaattaaaggtatcacagataaagaatattatactaattcattccatgtaccagtttattacaatataagtgcatatgataaaattgagatagaagctccataccatgaattgactaatgcaggtcatataacatatgtagagttagatggagatccatctgataatttagaggcttttgaaactgttataaaagctatgaaagatttgggtataggatatggaagtataaatcatcctgtagatagagacccaatatgcggtttttcaggtgtaataacaagtaatatatgccctgtatgtggaagaaatgaagatgaaagtgacatcaaattcgaaagaataagaagaataacaggatacttagttggtacagttgatagatttaataatgctaaaaaagcagaagtaagagatagagtaaaacatagatagttttatttgggggaataagttatgaaaataagaatgtcatctactataagttatgacagcatagttgatggaccaggattaagaatggtaatatggactcaaggatgtattcataattgtaaagagtgccataatcctcagacacatgatttatgtggaggattttatatggatacagaagaaattataaataaagtcaaatcattgaaattacaaaaaggcattacgctatcaggaggagaaccatttttacaaccagaaccattagaagaaatagcaagagaagctaaaataaatgggttagatgtatggtcatatactggatttacgtttgaacaactgttagataaaaaaaatagagcgtattttaaaaatttaaatttactaaagcaaattgatattttagtggatggaaaatttatagctgaaaaaaaagatataagcttaaagtttagagggtcatcaaatcaaaggataattgatgttcaaaaaagtttgaaatataaaaaagtgtttttggttgagcaatatatgaaggatgatttatctatagcagaataaaatataaataaacaggattaaatatatgcatatatttaatcctgtttattttcatataatatttcaagtttgtataatgtaacaattaaaccaaaagactcattgtatatttgaaattaagttttttatagtttataggtgttttatgtggattacgaatgatatagtatcgatacattatttaatcgattcttattccaagaaacaattaatttatagaaattcttaattgttacaatataaatatctagataagttataagatactgataaataatttataaagtttattaatctaatattgtgtgtgaatgttaagtggtcaagtagtctaaaaaatgaaaaagatttaaaaaagtgttttaactaaacacataagtgttaaattcatgtataagtataggttagatacataagaaataattatgtaatatctatctttgtaaaaaaatattaaattttgtaatttgtggataaatatgtttataatgtggataatatttaatgtaataagttaaagcaatatgaatcaactgtttataatgtggataatattataaatgtatgaataattgcagtatttaaaaacaaaaaaagttaaaaaagttgttgactctaaaagaaaaagttggtatagtaatacttgtcctcaagaaaagggcaaacaaataaagcataaagaactttgaaaattaaacagtaggttaatttataaaacaagaaacaaaccataaagccagatattttgataacaatagtatctgagcctgataaacttttatttgagagtttgatcctggctcaggatgaacgctggcggcgtgcctaacacatgcaagttgagcgatttacttcggtaaagagcggcggacgggtgagtaacgcgtgggtaacctaccctgtacacacggataacataccgaaaggtatgctaatacgggataatatatttgagaggcatctcttgaatatcaaaggtgagccagtacaggatggacccgcgtctgattagctagttggtaaggtaacggcttaccaaggcgacgatcagtagccgacctgagagggtgatcggccacattggaactgagacacggtccaaactcctacgggaggcagcagtggggaatattgcacaatgggcgaaagcctgatgcagcaacgccgcgtgagtgatgaaggccttcgggtcgtaaaactctgtcctcaaggaagataatgacggtacttgaggaggaagccccggctaactacgtgccagcagccgcggtaatacgtagggggctagcgttatccggatttactgggcgtaaagggtgcgtaggcggtctttcaagtcaggagtgaaaggctacggctcaaccgtagtaagctcttgaaactgggagacttgagtgcaggagaggagagtggaattcctagtgtagcggtgaaatgcgtagatattaggaggaacaccagttgcgaaggcggctctctggactgtaactgacgctgaggcacgaaagcgtggggagcaaacaggattagataccctggtagtccacgctgtaaacgatgagtactaggtgtcgggggttacccccttcggtgccgcagctaacgcattaagtactccgcctgggaagtacgctcgcaagagtgaaactcaaaggaattgacggggacccgcacaagtagcggagcatgtggtttaattcgaagcaacgcgaagaaccttacctaagcttgacatcccaatgacatctccttaatcggagagttcccttcggggacattggtgacaggtggtgcatggttgtcgtcagctcgtgtcgtgagatgttgggttaagtcccgcaacgagcgcaacccttgtctttagttgccatcattaagttgggcactctagagagactgccagggataacctggaggaaggtggggatgacgtcaaatcatcatgccccttatgcttagggctacacacgtgctacaatgggtagtacagagggttgccaagccgtaaggtggagctaatcccttaaagctactctcagttcggattgtaggctgaaactcgcctacatgaagctggagttactagtaatcgcagatcagaatgctgcggtgaatgcgttcccgggtcttgtacacaccgcccgtcacaccacgggagttggagacgcccgaagccgattatctaaccttttggaagaagtcgtcgaaggtggaatcaataactggggtgaagtcgtaacaaggtagccgtatcggaaggtgcggctggatcacctcctttctaaggagaattgcctactgtttaattttgaaagttctttacgaactttatatatgggggtgtagctcagttgggagagcacttgccttgcaagcaaggggtcaggagttcgactctcctcatctccaccatttaagagtatattacttaaatctttgatttacttagtagcctcttacaatgcacttatagcttaaatttatacaagctttgtgcgttagcactttaagcaacagaataaactgaacgtatgtgaagtttgtttgttggcgctgtgctttagcactttgaaaactgcatatatatatttagtgatatgacatctaatttgtaatatataaagctgataactttttaaaattatcgaagttgatagcttctaatctatcaaacctttttaactggtcaagttattaagggtgcagggcggatgccttggcactaggagccgatgaaggacgtgataagctgcgataagcttcggggagttgcacgtaaactttgatccgaagatttccgaatgaggaaactcacttagagtaatgtctaagtatcattaagtgaatacatagcttaatgaggggaactcagggaactgaaacatctaagtacctgaaggaagagaaagaaattcgattccgtaagtagcggcgagcgaacgcggattagcccaaaccaataaagttttctttattggggttgcggacatatcataacgaagaggtatcgtaattgaagaggtttggaaagacccaccacagaaggtaatagtcctgtatgttaaacgagaagacttcagatatgatccagagtaccacgggacacgtgaaaccctgtgggaagcaggagggaccaccctccaaggctaaatactacctagtgaccgatagcgtatagtaccgtgagggaaaggtgaaaagaaccccgggaggggagtgaaatagaacctgaaaccctgcacttacaagctgtggaagcacatttcttgtgtgaccgcgtactttttgtagaacgggccaacgagttacgttaagtagcaaggttaagcacttaaggtgcggagccgtagcgaaagcgagttttaactgagcgttcagttacttgacgtagacccgaaaccgggcgacctacccatgagcaggatgaagcgaaagtaaaatttcgtggaggtccgaacccacgagcgttgaaaagctcggggatgacttgtgggtagcggtgaaattccaatcgagcccggagatagctggttctccccgaaatagctttagggctagcctcaaggtgagagatacggaggtagagcactgaatgtcctagggggtattgcacctaccgaagactatcaaactccgaatgccgtcatcttatacttgggagtcagactgtgggtgataagattcatagtcgaaagggcaacagcccagatcgtcagctaaggtccctaaatgtaagttaagtggtaaaggatgtgggattgcacagacaaccaggatgttggcttagaagcagccactcattcaaagagtgcgtaatagctcactggtcgagtgatcctgcgccgaagatttccggggctaaaacttactaccgaagctacggcatcagtaatgatgggtaggggagcttcccatacgggttgaagcatgaccgtaaggacatgtggacagtatgggagtgagaatgttggcatgagtagcgagatgtgggtgagaatcccacaggccgtaaacccaaggtttccaggggaaggttcgtccgccctgggttagtcgggacctaagctgaggccgaaaggcgtaggtgatggacaacaggttgatattcctgtactaccgataaccgtttgagagaagggatgacacagtaggataagctaagcacactgttggttatgtgtgcccaagcattgaggcagtcaaagtaggcaaatccgctttgataatgctgggatgtgatggggagcgaaatttagtagcgaagtagctgatttcacactgtcaagaaaagtctctatcgaggttaaaggtacccgtaccgcaaaccgacacaggtgggtgaggagagtatcctaaggccagcgagagaactgttgttaaggaactcggcaaaatgaccccgtaacttagggataaggggtgccaccatcaggtggccgcagagaataggcccaagcgactgtttaccaaaaacataggtttctgctaagtcgcaagacgatgtataggagctgacgcctgcccggtgctggaaggttaaggggatctgttagagcaatcgaagcagtgaacttaagccccagtaaacggcggccgtaactataacggtcctaaggtagcgaaattccttgtcgggtaagttccgacccgcacgaaaggcgtaacgatttgggcactgtctcaacaacagactcggtgaaattgtaattccggtgaagatgccggatacctgcgacaggacggaaagaccccatggagctttactgtagcttgacattgggtcttggtactacatgtacaggataggtgggaggctttgaaaccaggacgccagttttggcggagccatccttgggataccacccttgtagtactgggactctaaccataggccatgaatctggtcttgggacactgtcaggtgggcagtttgactggggcggtcgcctcccaaaaggtaacggaggcgctcaaaggttctctcagtacggtcggaaatcgtacgtagagtgtaaaggcaaaagagagcttgattgcaagacatacaggtcgagcaaggatgaaaatcggacttagtgatccggtggttctgcgtggaagggccatcgctcaacggataaaagctaccctggggataacaggcttatctcccccaagagtccacatcgacggggaggtttggcacctcgatgtcggctcatcacatcctggggctgtagtaggtcccaagggttgggctgttcgcccattaaagtggtacgcgagctgggttcagaacgtcgtgagacagttcggtccctatccgtcgcaggcgtaggaaatttgagaagacctgtccttagtacgagaggaccgggatggacgtacctctggtgtaccagttgtcctgccaagggcatggctgggtagctatgtacggaatggataagcgctgaaagcatctaagcgcgaagccaacttcaagataagatttcccaccgcaagggtaagaccccagaaagactatctggttgataggtcgaaggtgtaagtgcagcaatgtatttagcttatcgatactaataggtcgaggacttgaccaatattatttgatgtcattcattaagatatatgtgcagtttttagagtgctaaatctatatttttaaacttgtcaaaacttatggatttttaatagttttataaggcaaaaaatcgaataaaaaaagtattgacacaataagacaaagatgttattataatacttgtcttagaaaaaaagttaaatgaaaatttagacaataatctggttataatagcagagaggatacacctgttcccattccgaacacagaagttaagctctctagcgctgatggtacttggtgggaaaccgcctgggagagtaggacatagccaggtaatgtgccgaagtggcggaactggcagacgcacaggacttaaaatcctgcgggacttacctctcgtaccggttcgattccggtcttcggcaccacaaattattgtgggccattagctcagttggttagagcgcccggctcataaccggtaggtctggggttcgagtccctgatggcccaccacaataatttaaagaactttgaaaattaaacagtaggttaatttataaacaagaaacaaaccataaagccagatattttgataacaatagtatctgagcctgataaacttttatttgagagtttgatcctggctcaggatgaacgctggcggcgtgcctaacacatgcaagttgagcgatttacttcggtaaagagcggcggacgggtgagtaacgcgtgggtaacctaccctgtacacacggataacataccgaaaggtatgctaatacgggataatatatttgagaggcatctcttgaatatcaaaggtgagccagtacaggatggacccgcgtctgattagctagttggtaaggtaacggcttaccaaggcgacgatcagtagccgacctgagagggtgatcggccacattggaactgagacacggtccaaactcctacgggaggcagcagtggggaatattgcacaatgggcgaaagcctgatgcagcaacgccgcgtgagtgatgaaggccttcgggtcgtaaaactctgtcctcaaggaagataatgacggtacttgaggaggaagccccggctaactacgtgccagcagccgcggtaatacgtagggggctagcgttatccggatttactgggcgtaaagggtgcgtaggcggtctttcaagtcaggagtgaaaggctacggctcaaccgtagtaagctcttgaaactgggagacttgagtgcaggagaggagagtggaattcctagtgtagcggtgaaatgcgtagatattaggaggaacaccagttgcgaaggcggctctctggactgtaactgacgctgaggcacgaaagcgtggggagcaaacaggattagataccctggtagtccacgctgtaaacgatgagtactaggtgtcgggggttacccccttcggtgccgcagctaacgcattaagtactccgcctgggaagtacgctcgcaagagtgaaactcaaaggaattgacggggacccgcacaagtagcggagcatgtggtttaattcgaagcaacgcgaagaaccttacctaagcttgacatcccaatgacatctccttaatcggagagttcccttcggggacattggtgacaggtggtgcatggttgtcgtcagctcgtgtcgtgagatgttgggttaagtcccgcaacgagcgcaacccttgtctttagttgccatcattaagttgggcactctagagagactgccagggataacctggaggaaggtggggatgacgtcaaatcatcatgccccttatgcttagggctacacacgtgctacaatgggtagtacagagggttgccaagccgtaaggtggagctaatcccttaaagctactctcagttcggattgtaggctgaaactcgcctacatgaagctggagttactagtaatcgcagatcagaatgctgcggtgaatgcgttcccgggtcttgtacacaccgcccgtcacaccacgggagttggagacgcccgaagccgattatctaaccttttggaagaagtcgtcgaaggtggaatcaataactggggtgaagtcgtaacaaggtagccgtatcggaaggtgcggctggatcacctcctttctaaggagaattgcctactgtttaattttgaaagttctttacgaactttatatatgggggtgtagctcagttgggagagcacttgccttgcaagcaaggggtcaggagttcgactctcctcatctccaccatttaagagtatattacttaaatctttgatttacttagtagcctcttacaatgcacttatagcttaaatttatacaagctttgtgcgttagcactttaagcaacagaataaactgagcgcatgtgaagtttgtttgttggcgctgtgctttagcacttttagtaacggaataatctgagtgaatacgaaggttgttcgttgacgtggtgcgttagcactttaagcaacggaatttattcgttggcgccgcgctttagcactttgaaaactgcatatatatttagtgatatgacatctaatttgtaatatataaagctgataactttttaaaattatcgaagttgatagcttctaatctatcaaacctttttaactggtcaagttattaagggtgcagggcggatgccttggcactaggagccgatgaaggacgtgataagctgcgataagcttcggggagttgcacgtaaactttgatccgaagatttccgaatgaggaaactcacttagagtaatgtctaagtatcattaagtgaatacatagcttaatgaggggaactcagggaactgaaacatctaagtacctgaaggaagagaaagaaattcgattccgtaagtagcggcgagcgaacgcggattagcccaaaccaataaagttttctttattggggttgcggacatatcataacgaagaggtatcgtaattgaagaggtttggaaagacccaccacagaaggtaatagtcctgtatgttaaacgagaagacttcagatatgatccagagtaccacgggacacgtgaaaccctgtgggaagcaggagggaccaccctccaaggctaaatactacctagtgaccgatagcgtatagtaccgtgagggaaaggtgaaaagaaccccgggaggggagtgaaatagaacctgaaaccctgcacttacaagctgtggaagcacatttcttgtgtgaccgcgtactttttgtagaacgggccaacgagttacgttaagtagcaaggttaagcacttaaggtgcggagccgtagcgaaagcgagttttaactgagcgttcagttacttgacgtagacccgaaaccgggcgacctacccatgagcaggatgaagcgaaagtaaaatttcgtggaggtccgaacccacgagcgttgaaaagctcggggatgacttgtgggtagcggtgaaattccaatcgagcccggagatagctggttctccccgaaatagctttagggctagcctcaaggtgagagatacggaggtagagcactgaatgtcctagggggtattgcacctaccgaagactatcaaactccgaatgccgtcatcttatacttgggagtcagactgtgggtgataagattcatagtcgaaagggcaacagcccagatcgtcagctaaggtccctaaatgtaagttaagtggtaaaggatgtgggattgcacagacaaccaggatgttggcttagaagcagccactcattcaaagagtgcgtaatagctcactggtcgagtgatcctgcgccgaagatttccggggctaaaacttactaccgaagctacggcatcagtaatgatgggtaggggagcttcccatacgggttgaagcatgaccgtaaggacatgtggacagtatgggagtgagaatgttggcatgagtagcgagatgtgggtgagaatcccacaggccgtaaacccaaggtttccaggggaaggttcgtccgccctgggttagtcgggacctaagctgaggccgaaaggcgtaggtgatggacaacaggttgatattcctgtactaccgataaccgtttgagagaagggatgacacagtaggataagctaagcacactgttggttatgtgtgcccaagcattgaggcagtcaaagtaggcaaatccgctttgataatgctgggatgtgatggggagcgaaatttagtagcgaagtagctgatttcacactgtcaagaaaagtctctatcgaggttaaaggtacccgtaccgcaaaccgacacaggtgggtgaggagagtatcctaaggccagcgagagaactgttgttaaggaactcggcaaaatgaccccgtaacttagggataaggggtgccaccatcaggtggccgcagagaataggcccaagcgactgtttaccaaaaacataggtttctgctaagtcgcaagacgatgtataggagctgacgcctgcccggtgctggaaggttaaggggatctgttagagcaatcgaagcagtgaacttaagccccagtaaacggcggccgtaactataacggtcctaaggtagcgaaattccttgtcgggtaagttccgacccgcacgaaaggcgtaacgatttgggcactgtctcaacaacagactcggtgaaattgtaattccggtgaagatgccggatacctgcgacaggacggaaagaccccatggagctttactgtagcttgacattgggtcttggtactacatgtacaggataggtgggaggctttgaaaccaggacgccagttttggcggagccatccttgggataccacccttgtagtactgggactctaaccataggccatgaatctggtcttgggacactgtcaggtgggcagtttgactggggcggtcgcctcccaaaaggtaacggaggcgctcaaaggttctctcagtacggtcggaaatcgtacgtagagtgtaaaggcaaaagagagcttgattgcaagacatacaggtcgagcaaggatgaaaatcggacttagtgatccggtggttctgcgtggaagggccatcgctcaacggataaaagctaccctggggataacaggcttatctcccccaagagtccacatcgacggggaggtttggcacctcgatgtcggctcatcacatcctggggctgtagtaggtcccaagggttgggctgttcgcccattaaagtggtacgcgagctgggttcagaacgtcgtgagacagttcggtccctatccgtcgcaggcgtaggaaatttgagaagacctgtccttagtacgagaggaccgggatggacgtacctctggtgtaccagttgtcctgccaagggcatggctgggtagctatgtacggaatggataagcgctgaaagcatctaagcgcgaagccaacttcaagataagatttcccaccgcaagggtaagaccccagaaagactatctggttgataggtcgaaggtgtaagtgcagcaatgtatttagcttatcgatactaataggtcgaggacttgaccaatatttatttgatgttcattgattaagatatatgtgtagtttttagagtgctaactctaaagaaactagtattgctaggttctataaacttattaaaaacttaatagaaatattaagcataaagattatgtggttacaatagcagagaggatacacctgttcccattccgaacacagaagttaagctctctagcgctgatggtacttggtgggaaactgcctgggagagtaggacgtagccacgttaaatgttccaaggtagctcaacggtggagcaaccggctgttaaccggtaggctgtgggttcgagccccacccttggagccaaaaaagccgaagtggcggaactggcagacgcacaggacttaaaatcctgcgggacttacctctcgtaccggttcgattccggtcttcggcacttataaaacaatatcgcggggtggagcagttggcagctcgtcgggctcataacccgaaggtcgtaggttcaagtcctgcctccgcaaccattaaaacggctcgttggtcaagaggttaagacaccgccctttcacggcggtaacaggggttcaattcccctacgagtcaccaattcaattaaatatgcgggtgtagctcaatggtagagttctggccttccaagccagctgtgagggttcgatccccttcacccgctccaaaaatgggaccatagctcagctgggagagcacctgccttacaagcagggggtcacaggttcgagccctgttggtcccaccattcgcggcctggtagttcagttggttagaatgccagcctgtcacgctggaggtcgagggttcgagccccttccaggtcgccaaattaaataagcgggaatagttcagtggtagagcgcaaccttgccaaggttgaagtcgcgagttcgaatctcgtttcccgctccataataacttgggtgcatagctcagctggatagagcaacgcccttctaaggcgtgtgtccggggttcgaatccctgtgcgctcattaagaaaagtttactataaattatagtaaacttttatattgtttaaaaagacacaggaaacatgtatattacctgtgtctttttatttataaactttaaactatgtaaaaattacagtatattctaatagagttacagtatattcattaatattgtaaacatacggagggtaatgtataatagtctacaagatgtttatgaaggcatcagttaaatataactaattagataagagttatatacattatattgtatactttatggtatttatatattgaaataacttatgaaattatttataaagagatttatgagcatatttttgtctaaacaataagtataagaaattataaaaaattagagactatagtgaattgacaatttaatgtaatatttataagttatactaagtaaattattatactgtgaaatggatatataactttaggtattgtgtattattttcactgtaggagattatatctagttatacataataagttttaatgatagtttatagtaagatattaaaataaatttatctaatctagatatgaaataagttattactttaatataaaaatgaatctaatggaataatattgatgataagtaatatttagattttgtatttgtttatagttaataagtggattatagaatttataataattaatatatattaaacaaagatatattaagatattttagaacataaaactgcattaaggcgcgagtactattttgtattcgcgccttgatggtttgagttatttgagtaaaaactaactttaataagaaatatgtatttattaagttgatatttttaatgtgtttagagattatttaacaatctccaaatataaaactagaattatttacataaaagttaaatagtttgtatagagttagatttatatagtataatacttagtgtaaataattaagaagttatcaaacaggaggataaaactgtgttagatataaattcttttttaaatggattttttaatataatattaagaatgagtatatatgatttaattgacatatctatagtagcgtatattttttacaaaatatttatgtttataaaagatacaagagcagaacaagtgtttaaaggtataatatttcttttattagcaactcaacttagtaacacctttaaattgcataccgtttattggatatctcttaaagctttagattatggagttatagctgctcttataatttttcaaccagaatttagagcaggacttgaacatataggaagagcaaagtttaatttatttggaaagaatgtaaatacttctgaagaaactctcaatagaaatatagaagaaattgtagaagctttatattcactttctagacaaaaaataggagctcttatcataatggagagagaaactagaataagtgatataataaatacaggaactattattgatgctgaaatttctaggcaactattaataaatatatttataccaaatacaccattacacgatggagctgttgtaattagagattctaaggtaaaagcagctgcatgttttttgccattgacggaaagtaaggatttaagtaaagatttgggtactagacatagagcaggaataggggtaagtgaggtgtctgactgtataactctgattgtatcagaggaaacaggtggcgtatcaattgctaaagcaggtaagttatatagagatatttctagagaaagaatgatgaatatattacgtagtaatttaaaaacaaatacagaaacaagaagttttttcaaaggtggtatatttaaatgataaatagactaaaaaataataccaaaataaaaataatatcatttttaagtgcaattgcattatggatgtatgttatggctgtagttgaccctgaagaaactaaagggtttgaagatatacctgtatctataagtaatatgagtgatttaaaggataaaaatcttgttatatatccagacgaaaaattaacagcagatgtatatataaaaggtagtttatcaaaggtacaaagtgttaagaaagaagatatacatgtatatggaaccattgaagacccaatacaaggacagaaggaagtatatttaaaagcaaatattcctcaaggtgttactctagaatttaagcatgatgttttagtagtaaatcttgaaaaaaacataaaagaaaaaagagatataaaggtagaagtaagtggaaattcaaaaagaaatataaataaaattgaacttagtaaggaatttgtcgatgtatcaggtccaagaactctagttaaagaagtcaaaagtgtaagagctaatctagatgttggtaatgagacagatgatttttctaaaaaattgcaattaataccattaaatagtgatggaactaaggttgaaggagtaacattaagttcatcctttgtgactgcaaagatagaactattgaaggaaaaaattgtcccaataagagtaagtctaaatgataataaagataatgatgtactgaaaaactataaattaagtaaggaacaagttacaataaaaggaaagaaagaagatatagacaaaataagttatattaagacaaaacctattgacttagctgatttggctaatggtgaagaaaaagaagttagcttagaaattccagagggtataactcttgaggatagctctataacaattaaattaaatgatacaaaacaattgagtgcagaatttttatataatgcgggagatattgaattaagaaatatcccaacaaatatagataatccaaatgtaatttctgatgtagatataaaagttgttgtagagtcaacggaggatttgagtaagttaaataaaaaagatatttcattatatattgatttatcacaaggccctgaggaagatagtaaatataaaataaaatatgaaacaacatatcaatttaaaaaaataaatatagaacctaatattgttgaagtggaatgaacaaatatttcgaatatttagttgttacaagatgcgacaaaaaaacctataaaattaagtttgttaattttatgtttttgttgcatcttgtttattttagttatattataaaataaggacaatgagatatttgttaaatctaaaaagcgctagatatatgaaaaaagactgataaatagatttaaataaatattttgaattaaatatttcaattatctctaggaaaacgttgctgaacgagttataatttaattgagatataaaaagttctatttcaaaaaattcaagatgaggtggaaatgcatgagaagttttgaagaagtaattaagtttgcaaaagaaagaggacctaaaactatatcagtagcatgttgccaagataaagaagttttaatggcagttgaaatggctagaaaagaaaaaatagcaaatgccattttagtaggagatatagaaaagactaaagaaattgcaaaaagcatagacatggatatcgaaaattatgaactgatagatataaaagatttagcagaagcatctctaaaatctgttgaattagtttcacaaggaaaagccgacatggtaatgaaaggcttagtagacacatcaataatactaaaagcagttttaaataaagaagtaggtcttagaactggaaatgtattaagtcacgtagcagtatttgatgtagagggatatgatagattatttttcgtaactgacgcagctatgaacttagctcctgatacaaatactaaaaagcaaatcatagaaaatgcttgcacagtagcacattcattagatataagtgaaccaaaagttgctgcaatatgcgcaaaagaaaaagtaaatccaaaaatgaaagatacagttgaagctaaagaactagaagaaatgtatgaaagaggagaaatcaaaggttgtatggttggtggaccttttgcaattgataatgcagtatctttagaagcagctaaacataaaggtataaatcatcctgtagcaggaagagctgatatattattagccccagatattgaaggtggtaacatattatataaagctttagtattcttctcaaaatcaaaaaatgcaggagttatagttggggctaaagcaccaataatattaacttctagagcagacagtgaagaaactaaactaaactcaatagctttaggtgttttaatggcagcaaaggcataattttaagggggaaataggcaaatgagcaaaatatttaaaatcttaacaataaatcctggttcgacatcaactaaaatagctgtatttgataatgaggatttagtatttgaaaaaactttaagacattcttcagaagaaataggaaaatatgagaaggtgtctgaccaatttgaatttcgtaaacaagtaatagaagaagctctaaaagaaggtggagtaaaaacatctgaattagatgctgtagtaggtagaggaggacttcttaaacctataaaaggtggtacttattcagtaagtgctgctatgattgaagatttaaaagtgggagttttaggagaacacgcttcaaatctaggtggaataatagcaaaacaaataggtgaagaagtaaatgttccttcatacatagtagaccctgttgttgtagatgaattagaagatgttgctagaatttctggtatgcctgaaataagtagagcaagtgtagtacatgctttaaatcaaaaggcaatagcaagaagatatgctagagaaataaacaagaaatatgaagatataaatcttatagttgcacacatgggtggaggagtttctgttggagctcataaaaatggtaaaatagtagatgttgcaaacgcattagatggagaaggacctttctctccagaaagaagtggtggactaccagtaggtgcattagtaaaaatgtgctttagtggaaaatatactcaagatgaaattaaaaagaaaataaaaggtaatggcggattagttgcatacttaaacactaatgatgctagagaagttgaagaaagaattgaagctggcgatgaaaaagctaaattagtatatgaagctatggcatatcaaatctctaaagaaataggagctagtgctgcagttcttaagggagatgtaaaagcaatattattaactggtggaatcgcatattcaaaaatgtttacagaaatgattgcagatagagttaaatttatagcagatgtaaaagtttatccaggtgaagatgaaatgattgcattagctcaaggtggacttagagttttaactggtgaagaagaggctcaagtttatgataactaatgataaaagaataagaatcataactggtcactatggaagtggtaaaagtgaatttgcgatgaactatgttgttaagttaagagatatggtttctggcaaagttgctatagccgatttagatgtggtaaatgtatactttagaactagagaaaagaaagagttaatgaaatccttaggtatacaaccaatagatagctcaattaatgctccaacattagatttaccagcagtatcagcagaggtaatgtctcctatggtagaccattcatacaattctgttatagatttaggtggagataatgtaggtgctagggttataggaagatttagtcatttgttaaaagaaggcgattatgatatgctttttgtaataaatgcaaatagggagaaaactcaaacttctgaagaagttatccaatatataaaagaaatagaaaaatcttctaaattaaaggtaacaggtctaattaataatactcatcttattaggtttactactattgatgatgttttaagaggtcagaaagttgcaaaagaagtttctgaaaaatgtaatataccgataagatatgttgcatgtttagaaaatcttgttgaacagttaccaaaagatttagaaggagaaatttttcctataaaattatatatgagagaagactggatgtagtttgagctcaaatatatagaaagtttaaggaggcttaggtaaatggctaaaggaaaagtatcttttaatcaagaacgttgtaaaggttgtggattgtgtgttgaagcatgtccagtaaaaatcatacaattagactcaaatgtaataaacaaaaaagggtataacccagcaactgtttttgaaatggaaaaatgcataggatgtgcaagttgtgcaactatgtgtccagatgtagttataacagtagaaagagattaatttaattaatatttaagggggaattttaatggctaagatacttatgaaaggtaacgaagcatttggaaaagcagctatagaagctggttgcaaatatttcttcggttacccaataactccacaaagtgaattaccagaatatttatcaagagagttacctaaaataggtggagcgttcgttcaagctgaatcagaagtttctgcgataaacatggtttatggtggagcaggtgcaggagcaagagttatgacttcttcatcttcaccaggagttgctttaaagcaagaaggtataacatatgcagtaggagcagaagttccttgtgttgtacttaatgtaatgagaggtggtccaggacttggaagtatacaaccttcacaagctgactactttatgtctacaagaggtggaggaaatggagactacagaactccagtattcgcaccagctacagttcaagaagctgttgatatgataatggaagcttttgacgttgcagattattacagatcaccagttatggtagttgcagatggtatgataggtcaaatgatggagccagttgaatttagagctcctgagaagaaaagagaattgcctcctaaagattgggcaactgttggaactaaaggaaaaagaaaacctaatgtaataaactctctatacttagaaccagaagtactagaagaccattgttggcatttacaagaaaaatttgatgcaatggaaaagaatgaagtacaatacgaaatgtacaaaacagaagatgctgaatttgtatttgcagcttatggaactacttcaagagtagtaaaaagcgcaattgatatattaagagaagaaggaataaaagcaggtcttataagacctaaagtattatggccattcccattcgaagcattcaaccaaattcctaatgctagaaacatattgactgttgaaatgagtatgggacaaatggtggaagatgttaaaatggcagtagaaggtaaattaccagtttacttccatggaagaccaggaggaatgactccaacaccagcagaaatagttgaaaaagctaaaaaaattattgccggagaattggttgcaggaggtgctagataatggctgttgtatttaagaaaactgaaggattacaagatactcaaactcactactgtccaggatgtacacatggtataatccatagattagttggtgaagtattagaagaactaggagtattaggtgatgctgtaggtgttgttccagttggatgttcagttttaggatataaatattttaactgtgacactcaagaagctgctcatggtagagcgccagctgctgctacaggaataaaaagagttcatcctgaaaatacagtattcacttatcaaggtgatggagacttagcttcaattggtactgctgaaatagttcatgcagctgctagaggagaaaaaataactactatatttgtaaacaatacaacttatggtatgactggtggacaaatggctccaactacattagttggacaaagagctactactgctcaatcaggaagaaatgctgaaactcaaggttatccaataagagtaagtgaaatgttagctacattaacaggagctgtatttgtagaaagagtagcagttgatactccagctcatgttagacaagctaaaaaagctataaagaaagcattccaagttcaacaagcaggattaggatttggaatagtagaagtattatctacttgtcctacaaactggggactagctccaaacgatgctttacaatggttaagagacaacatgataccatactatccattaggaaatttcaaaaatgttgaagttgaggaggtgaagtaaatgtctacagctagagtaatatgtgcaggcttcggaggccaaggtgttatgtctatgggacaattacttacttatgcaggaatgctagaaggaaaagaagtttcttggttaccatcttatggaccagaaatgcgtggaggtacagcaaactgtgcagtaactgtatctaatgagccagttggttctccacttataacagatgatgcaactgcagctatattattaaatataccagcatttgaaaaattcaaagatgatgttattcctggtggaaaaataatagtaaatagttctttaataaaagaaaaagttgatagaacagatgtagatgtttattatataccagcaaatgaattagcagctgaattaggaaatgataaagttgctaatatgataatgttaggcgcttacttaaaagtatctgatactgtagatatagaatctgtactagaagcattcaaaaaagttttcggacctagaaaagaaaaattcgttccattaaacagagaagctttacaaaaaggtatggatgctacatgttctaaagcaactaactaataaagaaaaagatgtcaaaaaaaagacaatagaattatttctattgtcttttttgctgataagtattaaaatgtttttatgactgaaattaagcctataatgatattttatgaactataaaaatataatacaaattacaagcttttcaattatgaaaggagaatctttagtgagaaagtattttggaacagatggagttagaggagtagcaaatacagaactaacatgtgatttagcatataaacttggtagagctggtggatttgtcttagctcaaggagaccacagagtaaaagtagtagtaggtaaggatactagaatatcaggtgatatgttggaagcatctttaatagcaggacttatgtctgttggatgtgatgttattactgttggaataataccaacacctgcagtggcatatttaactagaaaatatggtgctgattgtggtgtggttatatctgcatctcacaatcctgttgaatataatggaatcaaattctttaataagaatggatataaattagatgatgaaattgaattgaaaatagaagaatatatagacgatatagacaaaattgattgtcttccaattggtgaaaatgtaggaagaaaattacatgaacattgtgcacaaagagactatgtagactacctaaaatcaataataagcactgactttaagggattaaaagtagttttggactgtgctaatggtgcgtcatataaagtggcaccaatagtgtttgatgaactaggagcaagtgtaatttcaataaatagttcaccagatggaaataatataaactataaatgtggctctacacatccagaacaacttcaaagggctgttttggaacataatgctgacttaggtcttgcatatgatggagatgctgatagattaattgcagtaaatgaaaagggtcaaattgttgatggagaccatataatgatattgagtgccttaaatttaaagaaaaataataaattggcgcaagatactttggtagttacagttatgagtaatatagggttgacaatagctgctaaggaaaatggaataaatttatctactacagcagttggagacagatatgttttagaagatatggttaaaaatggatataatcttggtggagagcaatctggacatatgatatttttagattacaacactactggagatggagtgcttagttctctaatacttgcaaatataatcttgcaagaaaagaaacctttatcagaaattgcatcaataatgagccaatacccacaagtattagtaaatgcaacaataaaaaatgaaaataagaacaaatatatggaatatccagaaataaaaactgagatagaaagaatagaatctattttaaacggaaatggtagagttttgataagaccatcaggaactgagccattagttagagttatgttagagggtaaagaggaaggtcaaataaaagaattagcaacaaacttagctaatcttatacaagaaaaattatcgtaatttaaagggtattctcagatacaaatactgaggacacctttctaagcgccagaacttagttatagacataattattgagtaatataggaactaagttgacgaggtcagagttaatcgaattgtcggcggatgctctgcggtgtgtttaccatcgaaagacttctttaaataataggagcaatcctatggacaaagggaagccaaagtaaacttatatgacctaactcttaaaatatataaataatatttttaggaggacacaaataatgtgtggaatagttggatatttaggaagtagaaaggcagcagaagttatagtagaagggctttctaagctagagtacagaggttatgactcagcaggagtagcagttaatagttctaatgaagaagaacttaatattagaaagtttaaaggtagactttctgtacttgcagaagacttagaaaagaatcctattgatggaaatttaggtatagggcatacgagatgggcaactcatggagaaccatctgatgtaaactcacatcctcattttaatcaagccaaaacaatagcagttgttcataatgggataatagaaaactatatggaaataaaagaagaattaatttctgaaggtgttaagtttgaatctcaaacagatacagaggtaatagcacatttagtagataaatactatgagggtaatttattagatgctgtatacaaaactatatcaaaattaagaggagcttatgcattaggtgttatatgtaaagaacatggaaatgaattagttgcagtaagaaaagatagtcctcttgtagttggtgttggtgaaggtgaaaactttatagcatcagatatacctgcattattaaaatatactagagatgtttatttcttagaaaatggagaagtagttcatctaaaagacgaaaatgtaacagtttatgactctaatagaaatcttgttgaaaaagaagtatttcatgtaacttgggatgtagaagctgcgtctaaaggtggatatgactactttatgtcaaaagaaattcatgagcaaccaacaggagttagagaaactttagaaagaagacttgatgataatggaaatataattctagacagtataaatatttctaaagaagacttagaaaaaataaataaagtttatatagtggcttgtggaacagcatataatgctggattacttggtaagtatgccatagaaaaatttgtaaatataccagtaataactgatatagcatcagaatttagatatagcgacccatttgtagatgaaaattcattagtaatattagttagccaatctggtgagacagcagatactctagcagtattaagagattcaaaggctaaaggagcaagaatactttcaataactaacgttgtaggttcatctatagcaagagaatcagatgatgtattctatacttgggcaggacctgaagtagcagttgcatcaactaaggcatatactactcaaataacttctttatacatgatagctttagactttgctatcaaaaaaggaacaataactagagaattttatgatagtatgatttctaagatgaaagaaataccatcaaaaatacaagaaatattagacaatgaagaatatataaaagaagttgctaaaacagttgttagttctgaacatgcattctatttaggaagaggtatagactatagcttagcaatggaaggttcattgaaattaaaagagatttcatatatacatgcagaagcttttgcagcaggagagctaaagcatggaacaatagctttaatagaaaaaggaactcctgtaattgccatagctactcaagaaaagttatttgaaaaaatggtttctaatatggaagaagtaagagcaagaggagcttatgtagtagcaatagctcaaagccataataaggatgttgagaaagctgctgataaaataatctatataccaaattcagatgatattttatcaccaatattagcagttgtaccaatgcaattacttgcgtatcatgtctctgtactaagaggatgcgatgtagataagccaagaaatctagctaaatcagtaacagttgaataaaaacagattaaaaattaaatagataatatttattgaaaaaaactcatcctgttatttgtattttataggatgagttttttagataaatattaaatttgttttgtttttgctataataaattttataaaaagattgatattaaatcatctgtaaaatgataaatatatagaccataccaggtatagggaacgataaatatagttcatataaaatatagtgagtacttaataaacatatagtcaatatcagacataaaaaaataatagcttatgagaaaaattaaaatacaaggtattagtaaccttgtgataagataaagtgagtagtttaaaataagaatataaggaactatttataaaagaatataatgaagctaatagagtataagaaaattactttattttagtaaaataatttcaaataaaaatttttttaaattgggagtataaattatgacaaatgattttaaaaaagaaaagaaagaagattattttgttaatcttaaggcaatatctactgaagttttacaagaaaaaatgcaagataacgcttgggttatagttgatactcgcttaaatgatgcttataatggctggaagttagatggagtaaaaagaggtgggcatataaaaagagcagtagatttttctgctaattggttaaatgtatactcagatagaaaagatgaagtgctagaacaagcattgaaaactaaaagaattgatttagataaaaatatagtattgtatgatgcaaatggaaaagatgctttggttgtagcagattatttatctaaaaaaggatataaatatctatataaatatgatattaaacaatgggcagacgatgaaaatcttccaatggaaagatataaaaattatcaaatgatagttcctgcttttataataaaagatatattagatggaaaaattcctgagacatttgaagattcaaagaatataaaaatgattgaagcgagttggggagaagaatcgtatacaaaagggcatatacctacaagtgttcatgtaaatactgatattatagaacctcctccaacatggatgcttgataatgatgataacttaactaagtttgctttagactatggactaacaaaggatgatactgtaatagtttcaagtattacacctatggcatcttatagactagctgttatattgagatatataggagtaaaagatgtaagagttttgaatggtggaacaaactcatggttatcagcaggatatgaattagaatttattagtaatccaaaacattcatgtactaattttggagcagatataccagttaactcacaattagttgttactacatctgaattaagacaaaaactaaaagaaaaaaataagtttatactagtagataatcgtacttgggatgaacatataggaaaagtatctggatatacatattatgataaaaaagggcgtataccaggagctttatatggacattcaggtagtaatagtgtttcactagaagaatatcgtaatattgataatacaatgagaaataaatctgagattttagaaatgtgggacaaggaaaatatagatgtgaataaacagcttatatttatgtgtggaagtggatggcgtgctgctgaagtattaacatatgcaaatgtcataggagtggaaaatacctccctttatagtgatggatggatgggctggagtcttgataattcaaatttaattgaagtgggagaacacaaataaagtttttgaaagtacaatagagttgtttaaaacaaaggtgtttttgatttattaggaagagtgtgtaaattgtgtattgggaagtgtacttaggtatgttcatttggagctatggaaattgataaaaaagtattatctgtttattttgctggtaaaatatgaatagattatagattatagattatagattatagattatagattatagattatagattatagattatagatttaagtatagactaagtaatttatattacagaagataatatataagaattaatgcaagatgtatttgatacatataaggaattggcaagtccaggagaaggatagagaaaattgagattgaagagtttgaaagagattattagatgaaaaatacaaaaatgtataaaaatacatattgagaaagtatatctctcttaaatttgttaataattctattatacagaaaaacatatttaagggggattttttactatgaaaaaagtaaaattagctataagcttttttatattaatgattataggaatgacaatatcttatgcagatacaagtataaatactagatacaatagattaagtaaagctcttgaaatatcagaagcaaattttaaattttataatgttaaaattaattctgttataaatcataatttatcaaataaagaatttcataatatttttatagaaataattaacaatctaaagttggataaaaaaggaataaattggaatcaaaaagggtctggcgataaaatacaattatgtgctactataaaaggtagcgataaagaaatttctataaaaggaataaataaaaataacaaagaaagttacatagtagttgacatattggataacaaagtatataaacataaagaggttatttatagtaacgtagaaaatgtgttaaataaatattcatctcaagtagatgtgtctgcttgtattgttggagaatacacaaaaaggttacaaaacaacaaatatgatgatattttacaaaaaatattatataatatgagtgctaagcaaatagatgaagttaaagacgtaaactttttatctataacagcatatagtaaagtattaaatgattatgaattagaatatttaggggaaaaaattaatttaaatataggaattaaatataatgaggatgacggaaaaacactcatatatattgccacaccaattataaaattagattattaattatgaggagatcaaaaaatatggctaagataatagtaaaaaagagtaatccacttaaaggtagtgttaaaatagatggtgcaaaaaatgcagttttaccaataatagcagcgactttattagcaaacggaaaatcaacattaaatggagtaccaaatttaagagatgttcatgttatatcagatttattaagacatgtaggagcagaagttgaatataaagaaaatacacttactgttgatgcaagcaatataaaaacttgtgaagctccatatgagcttgtaagaaagatgagagcttcttttttggttatgggaccattgcttgctagatttaatagtacgaaaatttctatgccaggaggatgtgctataggaacaagacctatagatttacatttaaaaggatttaaagccttaggtgcaaagatagaaatggaccatggttttgttgaagcagcaacagaaaagttagtaggaaataaattatatttagatttcccatctgttggagcaactgaaaacataatgatggcagcttctttagcagaagggactacaataatagagaatgcagcagaagagccagaaatagtagatttagcaaacttcttgaacgaaatgggagcagatgttaaaggtgcaggtactaatactataaaaataaaaggtgttaaagagttaaaaggagcagaacataatgtaattccagacagaatagaagcagcaacttatatggttgcagcagctatgacaaaaggtgatataactgttgaaaatgttttaatggagcatttaaaaccagttgtagctaaattaagagaagctggttgcgaaataacagaaatggacaattctgtaagagttgtaggtccaaaagtattaaaaccaatagatataaaaactttaccacatccaggatttcctacagatgttcaagcacaatttatggctatgcttactgtagccaatggaactggtgtagttatagaaactgtttttgaaaatagatttatgcatgttgctgaatttaatagaatgggtgctaatataaaaatagatggaagaagtgcggttgttaatggtgtagatgagctacacggtgcagcagtaaacgctactgatttaagagcgggggcagcccttattttatgcggtcttatagcagaaggagaaactcaaataggagaaatataccatatccaaagaggttatgttgatatagataagaagataacagcactaggtggtcaaatcgaaatagtagaagattaataattggtttatagaagaaagttataaattaatagggttgttcatatacttaaatacaaggttttaaaagctaaggaggagagtatatgaagaacccattggttgttttgttaggatttgtgacttgctctgtgttagttccatcacttataactttagtttcttataaaaatgtagaattaactgaaaaaccagagagcccagtatctataaacaaaactattaaaaaaagtgatattgaagacaaaggtaataaagaagaaaaaagtacagtgagctatgaaactgtaaataaaaaagcaccaattatcaatgtatataatcatataacagggaaaaccgaaaagatggacatggagaactatttatgtggagtactagctggtgagatgtcttcagagtttgatatagaagctttaaaagctcaatctgtagcagctagaacatatgtagtatataaacaggaacatggtaaatctagtaaacataaaaatgcagtagtatgtactgattataaacattgtcaagaatataagagttatgatactcttaaaaaattaaatggtgaagaatggattaagaataaatattccaaaatccaagaagcagttagaggaactaaaggtcaaataataacttataatgataaggcgatacttcctctttatttttctacatcttcaggaaaaacagaaaatagtgaagaagtattttctgcaaaatatccttatttaaagtctgtggaaagtccttatgataagtattcccctaaatttgcgtcaacacttaaaataagtaacacagattttgttaaaagtcttagaagggcatatagcactattgtgatagatgtgaataatttaagtaaacaagtttcaataactaaaagaagtgatgccggaactgtagaaaaaataaaattaggaaataaagaattgactggaaaagacattagaactgtttttaaattgaactctgcaaactttgacataaaatttggagaaggatacatagatttcgtggtaaaaggatatggtcatggtgttggtatgagccagtggggagcagaaggaatggcagaagagggctataaatattatgatatattatcacattactacacagatacaaaaataaaagatatatactaataattgtataaaatgccaaaaacacgtcaataatccaaatgtagaaatatatttggaggtgcaaaatgaagaaaaagctgttagaaaaagatggtttttatttatctttgtttgtatgtgtttgtttattagcagtaggtggagtttggtttacaaataataatgtagataaattggcttctaataaaggaattatggaaaatgctaataaagatagtgaagaggaaatacatttaattgaaaaagacaagaaagatgctatccctactgcaacggattcaaaacaaaacttagaaaaagctaagtcaaaagaggaaaataaatcgagtacaacaaaattaaattacattggagataaagtaataagaggatattcagaaaaagaacctagttattctaaaactcttgatgtttgggaaactcataaaggtgtagatattagttgtactaaaggcaaagaagtaaaatctctattaaacggaatagtagtagatgtatttaatgatgaagaatatgggcaatcagtcaaaataaaaagtgacaataacattgtagtagtatattcaaatctagataaaaatgttagtgttaagaaagaacagaaggtaacagaaggacaatctctaggtactgtaggtagtacttctcaaatagaaagtgaagaaggtatacatgttcatttagaggcgtatagtggagaaaaatctatagacccaatgagtctaattaagtaaaagtataacaagtttaatcatatttggttaagcttgttatattttttggtgtttttacatatatatcattaaagctattatgtgaggggggtaatctttgagatctcatatagaggaaagggccatagtggtagcaaaatatatacttgaaaaaaacactacagtaagacaaaccgccaagacatttggagtaagtaaaagtacaattcataaggatgttacagaaagattgaaggaaataaatccatcccttgccaaagaagttaaaaatgtgctggacaaaaataaatcagagagacatattagagggggattagcaacgaaattaaaatatgagaaggaacataaaaaaatgtaggttaaaaacctactttttttattgaattaaattataaaaagaaatatattaagtaattataaatagcaaaataataatactctcaaaagatttattttctcttgattaaagcgagatttttgtatatgctttattataggagtattaaaataggcttataatataatctaatattataaataaaggagttgaaaaaatggctggagctgatataggcatagatttaggtactgcaaatgtgcttgtttatgttagtggtaagggaatcgttttagaagaaccatctgttgtggcgatagacaaaagaacagattctgttttagctgtgggagaagaagctaaaaagatgatagggagaacaccaggtaatatagtcgctataagacctttaagagatggtgtaatttcagattatgatgtaactgagaagatgttaaaatcttttatagataagatagttgataaaaagggatttggaagattttttatgccaagaattatggtatgtgtaccaacaggtgtcacagaagtggaaaaaagagcagtagaagatgctacgagacaagctggagctagagaagtatatatcatagaagaaccaatagcagctgccataggagctggtgtagacatatcacagcctaatggtaatatgattatagatattggtggaggtactgtagatatagctgtaatatctctaggaggagctgttgtaagtgaatctataaaggttggtggagatagatttgatgatgctatagttaaatatatgaaaaaacaacacaatcttcttataggagaaagaacagcagagaaaatcaagtttgaaataggttctgcatttaagagagaagaagaaaaatatatgaagataacaggaagaaatttaattacaggacttcctagttctataactataaattcaacagaaatgttggaagcacttagagaatgtgttgagcaaatagtagttgctactcatgctgttttggaaaaaacgcctcctgagttagcagcagatataggagatgtcggtataataatgactggaggaggttcattattatatggattagataaaataatagaacagaggacaggaataactgttacaatagcagatgaaccattatcttgtgttgcaaaaggtacaggaatagctttaggttcaatagacttacttgaaactggtgggtctttcaaaagaaaataattaggagagtttagaatgttaaatatagatgaaataaaaaaattaataccacatagatatccatttttattagtagacaagattacagagctagaagttgggaaaagagctgttggtataaagaatgtaacagttaatgaaccatttttccaaggtcactttccagaatatcctttgatgccaggagtactaatagtagaagctctagcacaagtatgtggagtggcaatgatgtctgtagaggaaaacaaaggaaaactaggtgtatttgcaggtatagataaagttagaatcaagagagaagtaagaccaggagatacattaactatggaaattgaaatgacaactcttagaaaaaatatagctaaggcagatgctaaggcatatgtaggtgaagaacttgtctgtaaaggtgaattaatgtttgctttagtagaaaaataaaaacttgaaatataaaagtaaaaaggtagataatttggagtatttaatcagatactctaaaatatctacctttttatataaagaattttatcatttagtttatatttagattaggtggatactaataaagccaaggctattgtttcagctaaatctaatataaagctaaggcgtatattattaaatgaaagtttattattttcatcaattttatctacaattcctactatagaataatttcctatttgaggtagttttttaccaacaccttttccgggcaggataggtccttctctaatctgtatattacctatgttactctgcgaccccaagcaagcatctatagccaagaagttaccttgtatatgtgtattttttatagtatctaaagactcatatatatttaaggcgtgaatagggttatctagtgtaccgtaaacggggtatttaaagttactgttcttaagtattgttccaactaaagggcctaaagtatcacctatagccctgtctgttcctatgcaaacaacaatcgtattttcattaattatagtttttagaactgaacttagcatctgtataacatcatcatcgctgtagtttactttagctaaatacaataggaacacccccttcaaaaaaatatatgaataaaaagcattaaaaagacctaactttaaatttcagatagatagaaaattttatttgtcttacaaaaaaaggaatagaaaaaatatgactaaaaatattgacaaaattttaaaaaaatagtaagctagtaaagtaaaacaaaacttaaatcttgattaccttatcaagagaggctgagggataggccctgtgaagcccagcaaccacccaaatgggaaaaggtgctaattcctacaagacaaaagtcttgaaagatgaggtcagttaattagtatgtaattacgattattaacctcttcttataaaggagaggtttttttattttgagtaaatttctaaaattaaaaataaggtaaaacctataataaaaattaagaataaataagggggaataaaaatggcaagacatttatttacgtcagaatcagttacagaaggacatcctgataagatatgtgaccaaatatcagattcaatattagatgcattattagaaaaagacccacaatctagagtagcttgtgaaactacagttactactggtttagttttagtagcaggagaaataagtacatctgcttatgtagacattcctaaattagtaagagaaacagtaagagaaattggatatacaagagcaaaatatggatttgattgtgatacttgcgcagttataacttctattgatgaacaatctggagatatagctatgggagttgatgaaggtctagaaagtaagactggagaagagatagaagaagaaatagaaaaagttggagctggagaccaaggtataatgtttggatttgcatgtaatgagactccagaattaatgccacttccgatatctttggcacataaattatcaagaaggcttacagaagttagaaaaacaggtttagttgattatttaagaccagatggaaaaactcaagttactgttgaatatgaaggaagtaaagctgtaagagtacatacagttcttatatcagctcaacattgtgaaacagtatcaaatgataaaataagagaagatttaattaatcatgttattaaggaagttataccagcagaattacttgatgaagagactaaaatttatataaatccaacaggaagattcgttataggaggaccacaaggagatacaggtcttacaggaagaaaaataataatagatacttatggtggatattctagacatggtggaggagctttctcaggaaaagaccctacaaaagttgatagatctgctgcttatgcagctagatatgttgcaaaaaatattgttgcggctggtcttgcagacaaatgtgagatagaacttgcatatgctataggtatagctagaccattatctatatttatagatacttttgggacaggcaaggtttcagaagaaaaacttgttgaattagtaaataaacactttgatttaagaccgggagcgataataagagacttagatttaagaaagcctctttataaaaaggttgctgcttatggtcactttggtagaactgatatagatttaccttgggaaagaactgacaaggttgagcagttaagaaaagatgctttaggtgaataatttttaactaaaaagctgttagaatgtaattttacgattactttctaacagtttttttattatgagttaaatatttttaataaatgttaatttatcatcatataatgaataaacagtatttaatctggtcaatacattttatataatactctactaaatttatacatattatgggatatatgttaaaggatggttaagaatgtgttaactaatgttaaataattaaaaatatattgaaatatcacaataatgagtctaatataatcttaataaacttacactttaaaaataattttaattgggggggagtagtgtatgtcaggcaaagtaaatattaaaacggttataagttttgctggagcttatgttgctactgtaataggttctggatttgcaactggtcaagaaatactgcaattttttacgttttatggatatgcgggtattataggtggaataatctctatggtactattttcatggtttggagcagaagttatagataagggaagagaattgaaacttaaggagccaataaaaatttatcaagtatattgtggaaaatatcttggaacattttttgaatggtttggtccattgtttttatttggaacattagtaataatgattgcaggagcaggagctacactatcagagtactatggattaaatccatatgtaggtaggattggtatggcaatcgtttccctaataactgtttcattaggtttgacaaggctttctaaaatactaggtaatataggacctataataataatatttacacttttagtaggagcaattagtttatttagcaatattgatgctttatcaaatgctggaaatatggttgatagtttaaatattaaaactgctacatcaaatggatatttctcgggagtactttatacttgttacaatgtaataatagtaataacattcttgacaggaatgggagcttctgcagtaaataagaaagatgctgtatggggtggtatagtaggtggagtagcacttatggcagcagctataatgatgaatttggcattactttcaaacataggaaatatatacacaaaagagataccagcactttacttagctgataagatatctccaataataggtattttattctcagtagtacttttactaggaatatacactacagctgtaccattgttatggtcagtaactaaccgatttgtagaagatgaccaccctaaatttaaaattataacaatagtggtaagtatattagcttgtataggaggtttactgccatttgataagttagtaggtacactatatccatatacaggttacatgggaattttaattttactatgtatgctttatagaagaattactaaaactgaggggtacaaggagaataaatctgaaataagttagtactgtaatatacttatggaatttaatttatactctaaatatagagtaattaaaataaaatagctatttaaatatggtacctgtatttcatggtaccatattttatggatgcagattttttttgtttctgataaaatgtataatagttggaaattacgttaagtataaaaatataaaacttttctacgattatcatagttttaatatataaaattatactaacatttaaatggagcgattattagtatttttaggagataaaaatggaaaaattagaaggaatgataagtgaaatagtctttaaaaacgaagataatggttatacaatagctcacctggtaaatgaaaatgatgaaattgtggttgtaggatgtatgcctactttggcaattggagaaagcatagaagttgaaggaaagtgggtaaatcataagatttatgggactcaatttgaagtgaatagttttatgccagtaacgccatcatccttagaaggaatttatgtttacttatcttctggaatgatacatggtattggtgaaaaaatggcaaaaagaataattgataagtttggtgtagatacgttagaggtgatacaaaattcaccagaaaaattacaagaagtagaaggtatagggagtaaaaaagtaaaacaaatagtaaaaagttatgaagaagacagagaattgagaaatataataatacagctatctccttttggaataacaccaaattactgcctaaaaatatataaaaaatataaaagcagtgcaatagaagttataaataaaaacccataccaacttgctgaagatataagaggaattggatttaaagtagctgatagtatagcaagtaaaattggtatagataaaaactctaaagatagaatttgtcagggaatcttatacactttaaataaatctttaagtaatgggcatacatatttaccagagcatgttctaatacaagattcggaaaaattattggagctaaatggagaaataataaaagagtgtgtaatgatgctagtttataatcaaaaaatacatatagagaaagtaaacaatgaaaatcttatataccttatgccatactatttagctgaaaatggagtatgtagtcaaatagtaaaattatcacagtatgaatttgaagacttaaaaatagatatagataacgagattaatgttttagaagaagataagaaaattaagttagcagaaaaacaaattttagcagtcaaagaatctgttaatagtggagtattaattataactggtggaccaggaactggtaaaacaactaccattaatgctatcatagatatatttgaaaataatggtaaaagtgtgactttggcagctccaacgggaagagcagcaaagagaatgagtgaaacttctaataaagaagcaaaaactatacataggttgctagaaatgggattttcaacagatgatgatttaactttttttaaggatgaagaagacccaataaattcagatgtaataattgttgatgaggtatcaatggtagacattatcttaatgtacaatttacttagagctataaagttaggaacaagagtaattttagttggagatagtgaccaattaccttctgtaggtgctggaaatgtacttaaggatatgattaattctaatattataaatgtagttaaattaaatgaaatatttagacaagcgcaagaaagtatgataattgtaaatgcccataagataaacaatggagaaccactttatctaaatacaaaaggtaaagatttcttttttataagaaaatcaactaatgaagaaattttaaatgaaataataggattggttaatgaaagattacctaaattttataaagttgataaattaaaagatatacaagttttatcttcaatgagaaaaggtgaattgggagttactaatctcaatatagagttacagaagtatcttaacaaaaaagaaaaatttaaagttgaagaaagtttttctaaaagattatttagagttggcgataaggtaatgcaagtaaaaaataattatacaaaaaaatgggaaacagaagaccaaaaagaaagtggagaaggtatctataatggagatataggatatgtttatcacatagataaagataagaaaactatttatatattatttgaccagactaaaattgtatcatacctatatgatgaattagatgaaattgaccatagtttttgtacaacaatacataaaagccagggaagtgaatttccagttgtagtattgccaatagcgtgggctcctcctatgttacttagccgtaatttattatatacagcagtaacaagagcaaaaaaattagttgtattagttggagatgtgaaatatcttgaatatatgataaaaaataatagagttaatcaaaggtattcaaatttaggatataagctaaataaatttaaacaagaagggttgttgatagaataaatatgaaaatatgcaatgataattttattaagaattttaaaaatatgattaataaatgtttggattttatatatcctgagaatataagttgcataatttgtgataaatccataaagaaaacaaatacttattcaatatgtaaaagttgttttaaagaaatgaattttatacaagatggttgcatgaagtgtggaaaaccaataatacgtcattcaattgaaaaagaatttattgaagagtgtagttattgttttaataaagacttttattttgataaatcaatatcttgtattgaatataatgatgtgacaaaaaagatggtgttagggctgaagtataaccaaaaaacctttatggctaagtatatagctcaaataatgaaagaaaaattatatttagaaaacataaaatttgattatatattatttgttccacttcataaaaaaaggctaaataaaagaggttttaatcaggcacaaaaaatagcatttaatttaagtaaaatagtaaatattccattattagattgcataagtagaaaaaaatatacaagaatgctatataaattgaataagaaagaacgaaaagaagaattaaaaaatgtatttgttgttaaagaaaatgttaaattaataaataataaaaatatacttttaatagatgacatatttactactggtctaacaacaaacgaaatctctaaacttttaaagttatcaggtgctaataaggtttttgtattgactctacttacaaaagcaaatgataattatattatggaataatcttatatattgacaattttagtttaaaatattaaaatgaataagtgatatttaggtctgtggttgaaagtccaagccagtcgcaggcaaagggatccacgtaagttaacactaaaaattgggttaatgatcatggtgcggcttagaagtaagacctaccgataataaaatcgagagagagtagtagtgcggcgaacccaagcgaaccctccagtaggcgagtgtggggtcaaaaaccaggtcagctaaatatcatattaaaagagagctagcatacctttatgtatagctcttttttatatataataaatttaggttgagtcataaagaggtgatatgtttgaataaaagacaagaaaatttattaacaacattgctattaaaagaagagtttataaatgttaataagattgccaatgattttgagtgttcagaaaggacaataaggaatgattgcaaatatattgatgaatggttatctactttttgtaatgcttatatcaaaagaaaacctaatattggaattaaatttagtggagatggaacagacaaaatactggtaaatcagaagttgcgaggtgaagttaaaagagtaaatagtgagcttcataagcaagttgagatattaaatttactactttgtaataataaaaaagttactttaaatgatttatctaataagttgtacataaataaaaatattgtcagagaagaaataagtaaattatcagtagcattaaataattataatttaaatgtctcgactaaaaaaggcagtggtatatatattgaaggggatgagaaagacataagaataatgttagtatcattcttatttaaatacatagataaatacagattaaacatagatgaaatagagtacttccatatagtagatataataattgtaaaaaacataatgcttactatagaggaggatatggatataagacttacagatatatcattcaagcaattgatgctatttttgcttataaatataatacgaataaggctgggaaattctttaaaagtatcaaatactaagaaagagcttaagctaaaaatgcttatattggatatagaagatgaattgaaatctaatttatccatagtattaaattatgaagaaaaattgtttatagaatctttaatattgggtatgaacaaacaaataaatagtaataatattaagaaatctttatatctaaatgaagaattagcaagttatacaaaaaaaattataaatttagtatcagaagaatcaggaataaattttaataatgatatattactttatgaacaattaatatgtcatttgaatgttacaatgcatcaaatgaaaagcaatgtttacttagaaaatccacttttagataacataaaaactaaattttgttttttatttacagtaatatcaagttcaatagaaattgaattaaaaggaaaacaaataacggaagatgaaattggttatcttacacttcactttcaaacctctctagaaagaaaatacagcaaaagggaatcaaataaaaaggcaagtattgtatgtccatttagttttggagtaagtatgctattaaaagtaaagatagaaaagagatttgataacataaaaattattgaaacattaagagaggaagatttaaaaagagataactttaataagactatagattttataattgcatttcaagagtatgaaaatatccaaaaaccaatttttataacaacaccattatttactgatgaggatgagaataaacttaaagagtttacaaacaaaataaaagaaaaagacacctcatataaacttatgaacagattaatgatgtctgattatttaataagagagttagaacatgatgatatttatgaagctataacatatttaactaatttattaattgaaaaacattatgcagaaaaagagtatttacaatctattataacaagagaaaagtcatatccaaccaatgttggaaaaggaatattattccctcatggagacatgaaatatataaaacaatctgttttatgttttgcaaggttaaaaacaccaataaaaattagaaatggaaaggatataaagattatacttttattagcatataaaaaagatgatgatagaaaagtatttagagaattatttaaagaaatatctaatttaacagaggatgaaaatatgctagatattctaagtaaatgtgacattgaaaaggtaaaagatattcttatataaaattcataatgaactatggataagcacaaaattttccatgtgatggaaaaagttgtgcatgtttttttgtttttataagatattatatgtttgtaaggtataaataatctaaaagtagagaagcaatttaggaggaaaaaatggaagaaatagttttaaagattataattcatgctggaaatgcaaaatctatgctttatgaagcacttgactatgcaaaggaaaacgattttaaaaaagcagatgaattaattgaaaatgcaaatgaagaaattttaaaagcacataaagtacaaactgaacttatacaaaaggaagctgggggagataaatcagatatatctattttattgattcactctcaagaccatttaatgacttgtatgagtgagagaaaccttataaaagaaatgattatgttaagaaaagaaattcaaaaattaaaataaaaaaattaagggggatttaaaagaatgaaaagaaaagtatatttattttgtagctttggtatgtcaacaagtttacttgcagataaaatgcagaaggtagcagatgaacacaatttaccaatagaagtagaggcatttccgatagcagaaattgacaaaatagttgaagaaaaaaatccagattgtatattattaggaccacaagttaaatacatgctaaaggagttaaaaccaaagtttgaagctcaaggaaaacttatagatataatcaatgaagttgattatggaactatgaatggggaaaaagtattaaaacttgctataaagctaataaaatctaaacaagcgtagaattatagtaaaaaataataggaaatgagggtggatagatgaatagattggaaagaatacttatgccattggctgaaaaaataggtaaaaataaattattaattgcaattagagatggttttttaatatcatcaccattattaataataggttcattatttttattagtagcaaattttcctataaaaggatggaatgaatttgtaggtcaaatttttggtccagattgggctgtaaaattgcaacaaccaactgtagcaacatttgaagtaatgactttacttgcagttttaggaattggatattcttatgcaaagcaaatagatgtagatccaatagcatcagctgcagttgcaatagttgccttttttatagtaacaccgtttgtaataccatatacaccagaaggaacagaatcagtctacatggtaacaggtataccactaggttggatgggctctaagggaatgtttgtaggtatgataacagcaataacctctgtaaaattatttgctgcagttgtaaaaaaaggatggacattgaaaatgccagatggagttcctccaaccgtatcaaaatcatttgcagcattaataccaagtgcaatagttatggtagttttctttttagttaagatagcttttgaagctacaccatatggaagtatacatgaatttatatttaagtttttacaaatgccattattaaaattaggaaatagtttaggtgctatggcaatcgcttatatattcttacatttattctggttctttggaataaatggaagtagtgttgttggggctgtgtataatccaatattaaaaattctatcagctgaaaacttagctgcttttcaggctggttcaaaaataccaaacataataacaggtcaattccaagatatgtttgcgacatttggtggagcaggtagtacactatcattagtcatagctatgttattaatatgtaaaagtaaacgtataaagtcaatgggaaaactatcaattttaccaggaatatttggtataaatgagccattgatatttggtctaccaataatgcttaacccaatactattgataccatttgcaatagttccaacaataaatataataatagcttacttctgtatgtcagcaggattagtgcctcttacaaatggagttcagttaccgtggacaactccaattatattctctggttttttaacaacaggatggcaaggtgcagtcttacaattagtgcttcttatactaggaatatttatgtatataccatttataaaaatgctagataagcaatacttgagagaagaaaatgaaactgttgaagaggaagatgatgatatatcttttgatgatttagtattataggaggaagattatgaagaaaatagttatgatattggatcaaatacaagctggagctggaggaaaagagaaaagtaatatacctcctgctggaaaatcaagcccattaggaccaggtgtaatgatggagcaatttttaaatgaatctaaggtaatagctaccttattttgtggggatgaattttttgtaaataatgaaaaagaagtaacgagtaagatgatagctatggtaaaaaaattaaaccctgatgtagtaatctgtggaccaagctttaattacgaaaacttttctaagatgtcagcaatactgtctaaaaatataaatgataaaacagatataccagcttttgcagctatgtcagaagaaaatatagatgtgataaacgaatataaaaatgacatatgtatagttaagactcccaaaaaaggtggaattggtcttaatgattcattaaataacatatgtaaattggcaaaagcaatagcgaataaagaagatataactttgatgaaagaagaattttgttattaataagagtattaattattagcaagtttaaatattatactatttataataagcatacattagtaaaatctatataatttaaggaggggaattttaacatgtggggaatgatagcgacatggagaatggccctagaaggaataactgaggcatcagaacatttagaaaaaggcatggaagcaggtgatgctgtagagcttgctgtaagaagagttgaagactatccattctataaatcggttggatatggtggacttccaaatgaaaattgtgaggtagaacttgacgctgcatttatggatggtaacacattagatattggcgcagttgctggtataagagattattctaatcctgtcagcatagctaggaagttaagttatgagaaggtaaataattttttagttggaataggtgctgaagattatgctcataaaaatggatttgaaagaaaaaatatgttgactgatagagcgaagttacattataaaaagagaaaaaaagagactttagacaaaggattaagcccatatgctggtcatgatactgttggtatgatatctttagacaaaactggaaaaatgtgtgcagctacatcaacaagtggattgtttatgaagaaaagaggtagaataggagattctgcactatctggttcaggattctatgttgatagtagtataggaggagctacagctactggtttgggagaagatttaatgaagggatgtatatcttatgagatagttaggcttatgaaagaaggaaagcatccacaagaagcatgtgatattgcagtaaatgaacttgataaacagcttatcaaaagaagaggaaaagctggtgatttatcattagttgccatgaataataaaggtgaatggggagtagctacaaatatagttgatttcactttttcagtagtaactaaagaagaatctcctgctgtatatatttcaaatagagtagatggaaagactatacataaggttatatcaaatgagtggatggaagcatatgaggctagaataaaagcaccgatagaagtaagtgagtaaagtagtgttacataattaaaatagagttttataataaggagatttttatgaatatcataagtaataaaatagatgagttaaaagaagatttattaagtgatattatagatattgtaaaaatacctagtgtcaaaggggagtcagaaaatggcttcccttttggcgaaaaagtaggggaggcacttaataaagcattagaaatatcaaaaaaattgggatttaaggttagaaacttggataattatattggttatgcagagcatggagatagtgatgattatgtttgtgtaattggacatgtagatgttgtacatgaaggagatggttggaagcatcagccttataagggagaagaaactaatggaagaatttatggacgaggagtactagacaataaaggacctataatgtctgccttatatggattatatgctattaaagaattaaacttaaaattagataagagagttagaataatatttggtacaaatgaagaaagtggatttgaagatataccatattatttagaaaaagaaaaaacacctattatgggatttacaccagattgtaaatatcctgttgtatatggtgaaaaaggcatggcaaagattagaataaaaagtaaaatcaattatgaagaagatgtatacctaggttttatagaaaatatgtctgaaaatgtgcttgttacatataaagagctgaatatagaaaatagtaatactatattagatataaaggtaaaatacgattttagttataaattgaaagatgtattagatgaaataaaagctagttttccaaatagtatcgatatagaggtaatttctaattttaatcctgtatattttgataaagagagtaatcttgttaaaaagcttcagctagcttatgaaagggttacatcattagatggaactcccgtgacaactaatggaggtacgtatgcaaaagtaatgccaaatatagttccgtttggaccttcatttccaggacaaaaaggaatagctcataatcctgatgaatacatggatatagaagatataatattaaatgcaaagatatttgcaaatgcaatatatgaattagcaaaggagtagttatgttagaaataataggaatgtcagtagaagacgctaaaattatagaagattgtggtgcagatagaatagagttagttagtgctttaactgaaggtggattgacaccaagttttggtcttatagaaagtgttgttaacagtgtaaagatacctgtgaacgtaatgataagacatcatgcgaaaagttttgtatacagtaaagaagatataagtataatgcaaaaagatataggtgtggttaaagagattggtgctaatggagttgtatttggtgtattggataaaaacaataatatagatgagaaaaatctaaatgttttattgaaatgttgtgataatcttgatgttacatttcatagagccatagatgaatcaaatacaatagatagtgttaaaattttgaaggattatgataaaattacgaatatattaacatcaggagggaaaggaagtatagttgataacatacaaatgataaagaatatgatgcttagttctaatcacataaaaattcttttaggaggaggtcttaattttaataatatagaaaagataaaggaattaactaaagcaagtaattttcattttggtacagcgattagaataaataacagtccttttgaagatatagatagacaaaagcttaaacaactcgtaaatataatttcaagatagtatatgaatataaaatacttagtttaaataaagagagtaagttaattataatttgggtatatgaatgttaataggtattaaatatgaaattattgttgagtatgctttataacttttaagtagttttaaatataaataatgaaagaaaagatagattatggaggttttagagggtttatagttattaaaaaattataaaggtatattggcatataatacacataatttcctaaaattaccatcttatgacatgaattcacatattaataaacaattaatggagatttttgtggatagaaataggagtaaaaatagctttaaataaacaaaaacaagagttattaacagttttatccacattatccacaggtgtttgtaataatattaatccacataagtatcaatgtaactaaaaatgataaataattctatcaattgaatagaaaaaatcataaaagtaaataataaaaagaggattatgagagttcgtgtagaatatattattaaagtataaattttcttatactgacataattgaagggagatgtatttatgaacataattatatctggaaaacaaatcgaattaactgatgcaataaaaaataaaatcgaaactaaactaagtaagttagataattacattcatccagacactgatgtaaaagttacagtaagtgcgagaaaagcaagacaaaaaatagaagtaacaatagctactgtaaatggtcctataattagagcagaagatatgcaggaaaatttatacacagctatagatgttgtatatgataaattaagtaaacaattaaaaaaatataaaaagagattacaagataaacataaagacaacaagagtataagattccaagattcagagataaatctagctgatgaacaagaggattatggggatgaaaatcaagaattagtaattcaaagacgtaagaaatttagtgttaagccaatgagtgaagaagaagctgtattacagatggaattaataggacatgatttttatatgttcaagaacatagattcagatgaaatagcagtagtttataagcgtaataatggtggatatggtataatagaacatgaataaagcaatttagatttaatcatattagctatcgataaataaattatcgatagctttttaaattaatattaaaagtatagtttttatggtaaaatgaataatagtacaataaagaacgaggagagatgtaaaatatgagctttatggataatttattcaacatggcagataaaaaagaattaaaaaagttcaataaaactgttgatataatagattcattagaacctaaatttgaatctatggcagactcggaacttaaaaatatgacaaatatatttaaagaaagattagcaaatggtgaaagtatagatgatatacttccagaagcttttgcagtagttagagaagtttctaagagagtgttaggacttagacactacagagttcaaatgattggaggtatagtactacatcaaggaagaatagcagaaatgaaaacaggtgaaggtaaaactttggttgcaactgctcctgtttatttgaatgcgcttactggaaaaggtgtacatgttgtaacagtaaatgattaccttgcaaaacgtgatagagaccaaatggcaaaaatctatgagtttttaggaatgagtgtaggcgttattatacacggtcaaaatccaaaagttagaaaagaacaatatgattgtgatataacttatggtacaaataatgaatatggatttgactatctaaaggacaatatggtaatacacaaagagcaaagagttcaaagaggattaaattatgctatagtggatgaggttgactctatactaatagatgaggctagaacaccacttatcatatctggacctggagacaaatcaactcacttatattcagatgcaaacacatttgttttaaccttaaaaccagatgattatgaattagaagaaaaagataaggctgtatctctaacagcatcgggtatacaaaaagcagaagtgtattttaatgttgataatataacagatatatctcatacagaattataccatcatataaatcaagctttaagagcacatgtaataatgaagaaagatgttgattatgttgctaaagatggagaaatagtaatagtagatgagtttacaggtagacttatgtttggtagaagatattcagaaggtttacatcaagcaatagaggctaaagaaggtcttaaaatacaaagagaatctaaaacactagctactgtaacattccaaaactactttagaatgtataaaaaactttctggtatgactggtacagcaaaaacagaagaagaagagtttaaagcaatttataaaatggacgttttccaagtacctaccaataagcttatggtaagagaagatttaccagattctgtatacaaaagtgaaataggtaaatttaatgctgtagcacaagaaataattgaaagacataaagttaatcagccaatacttgtaggtacagtatcgatagaaaaatcagaattattatcacaaatattaaagaaaaaaggcattaaacatgaagtattaaatgctaagcatcatgataaagaggcagagataatagcacaggctggtagattaggcgctgttacaatagctacaaatatggctggccgtggtacagatatagttttaggtggaaacccagatttcttaactaagagagaaatgagaagaaatggatttaaagaggaaatagtaaatagggtagatactccaatagaaggtatacctgtaaaaggtaatgaaattctatttgaagctagagaagagtatgaaaaactatttgaaaagtttaagcaacaaacacaagaagaacaaaaacaagttgtagaagcaggtggacttgctataataggtacagaaagacacgaatctcgaagaatagataaccagttgagaggtcgtgctggtcgtcaaggtgacccagggagttcaagattctatataggtcttgatgatgaccttatgagattgtttggtagtgatagaatatctggtattgtagataaaataggtcttgaagaagacatgccgatagaacatagaatattatctaagtctattgaaggagcacaaaagaaagtcgaaggtaaaaactttggaataagaaagcatgtacttcaatatgatgatgttatgaataaacaaagagaaataatatatgcagagagaaaacgtgtattagaaggtgaagatttacaagaacaaatacaatcaatgactcattctataatagaagaagcagttactctttatacacaagataaaggatttgatgaagaaggattcaaagaacatatgtataatctgttcttgccaaaaggtagcatagaaataccagaaatagaaaaacttaatccagttgaaataacagaaaaagtttatgaaatagctatgaagatatatacttcaaaagaagaacaagttggctatgagagaatgagagaagttgagagagtaatcttacttcaagctgttgataaccattggatagaccatatagatgctatggaccaattacgccaaggtattggtcttcgtgctgtaggtcagcaagacccagttattgcttataaaatggaaggttttgatatgtttgatgaaatgaataaacatatcaaagaagacactgtaagatatttatttaatataacaatagaaactccagtggaaagaaaagcagttgtagatgttgaaaatctatcttctccatcagatggaacacttccaacaagtaaaactgttaaaaaagatgaaaaggttggaagaaatgacttatgcccttgtggaagtggtaaaaaatataaaaactgttgtggaagataatctcggaggattaaatgttaaagttacaagagtatagacatagtatggagcagatggcttcaaatttagaagaattgagggtttctctttgacatagcttcattgatgaaaaatatacaaattaatgaagaaaagatgaatcaacaagacttttggaatgataatgaagtcgctcaaagagtacttcaagaaaataaatctttaaaagagacattagaagaatatgaaagcttaaaaagcttattagaagatatagaagtattaattgaaataggtttagaagaagatgatgattctgtagaaagagatatagaaaagtccatagaatcaatggaagaaaaattatctgaaatgaaaataaagactcttctaaatggagagtatgataaaaataatgctatattatctataaatgctggtactggtggcttagatgctcaagattgggctcaaatgcttttgagaatgtatataagatggtcagaaagtaagggttataaagttaagcttttagatataatatcagaccctgaagcagggataaagacagctacaattcttgtagaaggaacaaatgcttatgggtatttaaagagtgaaaaaggagttcatagattagtgagaatatctccatttgacccatcagggaaaagacatacttcatttgcatctatagatgtaacaccagagttagatgaaaatatagaagtagaaattaatccgtcagatttaaagatagacacatatagagcttctggagctggagggcaacatgtaaatactactgattcagcagttagaataacacatatccctactggtgtagtagttcagtgccaaaatgaaaggtctcagcatctaaataaggacagagctatgagacttttaatggcgaaattgatagaattaaaagagttagagcaaaaggaaaaaatagaagatatacaaggcaaatactcacaaataacttggggtagtcaaattaggtcatatgtttttcaaccatataaattggttaaggaccatagaacaaatgctgagtttggaaatgtagatagtgtaatgaatggaaatatagacttgtttattaatgaatacttaaaaatgaataaaatagtttaataaatatgcactgtaattaagatatatgtataagaaggttagtgcttaatatgcacttacagcacttaggctgaggacgataaccctcagccttcgttctgttttgttatacttatgaaaaactaacattaggagtgaataaattggatataaatcaaatcttaaaaaaagagtttaatcttagagatgaacaaataaataatacattaaaacttattgatgaaggaaatacaataccatttatagctagatatagaaaagaaatgactggcgaaatgagtgatgttacactaagagaattttatgaaaaattaatgtatttgagaaatcttcaaagtagaaaagatgatgtagttagactaatagatgaacaagggaaattaacagatgaaataacacaaaatatagaaaaagcaaaaacattacaagaagtagaagatatatatgctccatataaacaaaagaaaagaactagagcaacaatagcaaaagaaaaaggattagaaaatttagcattgtcaatactagagaataatttagataatatagaaatagaggcaaagaattatcttgatgaagagaaagaagttctttctattgaagatgctctaaaaggtgctagagatataattgcagaactagtctcagatgatgctaagattagaaagtatataagagaattagctttaagagaaggtatgatagttagcaaaagtgctactgatgagaaatcggtttatgatatgtattatgattataacgaagcagtaaaaagtatggctccacatagagttttggcaataaacagaggagaaaaagaaagcttcctaaaggttaagttagaaataaataatgataaagttttaaattacataataaacgaatatgtaaatgataaaaatttcaaaaataaagaagaaatcgtaagttcaatagaagattcttataaaagattaattttcccatcaatagaaagagaaataagaaatcatttaacagaaatagctcaagaaagagctataagtgtatttggaaagaatgttaaaagtttattgcttcaaccaccagttaaagacaaagtagttatgggatttgaccctgcatttagaactggatgtaaaatagctgtagtagataaaaatggtaaactactagattatacaacagtatatccaacagaccctcaaaatgatgtagagggagcaaagaaagttttaaaaggattgattgaaaaatacgatatagatataatttcaattggaaatggtactgcatctagagaatcagaaacttttgtatcagaaatgataaaagaaatagatagcgaagtgcagtatgtgatagttagtgaagcaggagcatctgtttattcagcatctgaacttgcaaatgaggaacatccagatataaatgtatcaataagaggagctatatctatagctagaagattacaagacccattagcagagcttgtaaaaatagaccctaaaagtattggtgttggtcaatatcagcatgatttaaacaaaaagagattagaagaagtgctagatggagttgttgaagattctgtaaatagtgttggagtagatttaaataccgcatcatactccctactagaacatgttgcaggaataagtaaagctatagcaaaaaatataatagcatatagagaagaaaatggagattttacatcaagagcacaattgaaaaaagtaaaaagactaggacctcaagcatttactcaatgtgctggatttatgagaatcttagagggtaaaaatccactagataatacaggtgtgcatcctgaaagttatgatatatgtaaaaaaatgattgagataattggatattctttagatgatgtaaagaataagaatataggtgaaatagatgaaaaaataaaagaaattggcttgagggaattaagtgaaaaactggaagtaggacaagttacgttaaaagatatcatagctgaaatcaaaaaaccaggaagagacccaagagaagaaggtataaaacctatacttagaactgatgtcttaaaaattgaagatatacaagagggtatgactttaaaaggtacaataagaaatgttgtagactttggtgcatttgtagatattggaataaaaaatgacggattagttcataaatcagaaatgagtaatagttttgtgaaagaccctatgagtattgttacagtaggtgatatagtagatgtaaaagtcattggaattgacttaaacaaaaaaagagttgccttatcaatgaaaaaatagataagtttatgtatggttatagtacttaaattctatatttgtaaatgagattactcgagtgtataaatgttaaaaatttgtaaaagtatatagtaagaaaatatattaaaataagaacgatagtcttgaaaatcaggaggaaaatgaatgatttttataaaaaatggtaaaataaataccataacaaatgggataattcatggagatatacttatagatgaaggaaaaataatagaaattggagaagatttgatagctcctttagatgtagaggtaatagatgctagtaataaacttgtgtttcctggatttatagatgctcatactcacttaggtttatgggaagatggtatagggtttgaaggagcagatggaaatgaagagactgacccaataacaccacaattaaatcctatagatggaattaatccaatggatagaacttttaaagaagcttttgaaggtggaataacttctgtttgtacaacccctggaagtgcaaatgttatgggtggtcaatgtatagctataaagacatgtggaaaaagaattgataaaatggtaataaaaaatccagttgcatctaaaattgcttttggagaaaatccaaagagctgttatggtcaggatgataaatctcctcaaactagaatggctatagctgctttacttagagaaaacctaaaaaaagcagaagaatatttagaggatattgatatgtatgagagtcatgatgatgaagactgtgaaaaacctgaatatgatataaaaatggaaagtttaataccagttttaagaagagaaattccttttaaggcacatgctcatagagcagatgatatgtttacagcaataagaattgcaaaagaatttaatttaaagcttacattagaccattgtacagaaggtcatcttattgtagatgaattagtggaagaagggtttcctgtaatagtagggccatctttgtcagaaaggtctaaatttgagcttagaaatttgacatttaatacagcaggaatactttcaaatgcaggtcttgatgtatgtataatgacagaccatccagtaataccagttcaatatcttccaatatgtgcaggtattgcagtaaaacatggtatgaaagaagaaaaagcaatagaatcaattacgataaatccagctaagactttaggaatagaagatagagtaggctctatagaagttggtaaagatgcagacctagtaatttgggataattctccactagagattcaaagtaatgtactttacactataataaatggcaaagtagtgtatgagaaaaaataacttgacaattattaaaaaattaactaatataagagtgtaaggaaaattaaaaaatcaaagaagatcttcggggcagggtgaaattccctaccggcggtatagcccgcgaactacttaggtggttgatttggtgagattccaaagccgacagtaaagtctggatgagagaagatatttatggaagataaataagtttattttagtttgtttaaactatatccataaaaactcgaagatagggtcttcgagttttttgtttttcctaaaaaatataaacatattgattagggggaaaataattatgcaaaacacagcaaaaagaggcaatatgatttcaacaagaactttagtagtaatgtcaattttatctgcaatatcttatttattaatgtttattcaagcaccaataccaggtatatttccagatttcttaaaaattgacttatcagatattccagcaatattcggaggaatgtctctaggaccattagttggatttggaatagttgtagtaaaaaatgtgttacaagcaataacagcaacaacaactggaggaataggagaatttgcaaatatattaattggtggttcttatgtaatgatactttgttattcatataagagaagtggagatttaaaaggtgtactgattggttttgtattaggaacaatatctatgactataattggttcattagtaaattattttgtaatgttgccactttatggtcaacttatgggactagatgctataataggtttaggttcagctataaatcctcaagttcatgatttattcacttttgtaatttggatgatagctccatttaatgtgctgaaggctgttataatatctttagtaacattgccactttataaaaaaatgggaaatataataaagaaataattagacaagaaaatataaaattaaatgtattgaatagccataatttatttataacttcagtcctatattgtgattgatatattaaatatattatggctttattaatttatcaaaaaatgtatataaaataagaaatatttagacaaatttaaattttaaaataaaggaagaattaaaacgattaactattaaaatatgaaaaaggtatctacaatatacagagcgaatttataataaacaaaaaataaagttattattaaaaaactataaagactaataatcaaacttttaataataactaatttaataatgataggggtgtatattcatgcatttatctaaaaaaataaaaaaattatttttagatgataaagggtattattttaatagtaattgggaagatattcatattggtatttatgatacaaaattaggagattctttaaagtatatcactaatgaatatattgaaaatatggaaagggtaaaatacgattatcgtgaattaaaaaatatagaaaatcaaactgatggtatgtgtattttagcaataaggcagaattacaaggcattagagtatgtaaaaaatcaaaccgaagaattatgtttagaggcaataaagtataattataaagcacttgaatatgtaaaagaacaaacagaatacttgtgtcttgaagctataaaaaaagattgtaatgcacttaagtatgtacgaaataaaacagaagggcttattataaaagcaataagtcattcttccaatatagatgttgtaagtatactaaaggctttagagactcaaacaagaaggatatgtttagaagcaattaaaaaagatggcaggtgtcttgcatacgttagagaacagagtgaagaattatgtatagaggccattaagcaaaattataaagcattaaaatatgtaaaaaatcaaacggaaaaaatgtgtatagaatccgtaagacaaaatggtatggcattacaatatgtaaataaacaaactgataaaatatgtatagaagctgtcaaacaagatggaagaagtctacaatttgtcaacaataagacagaagaaatatgtataaatgctataagatatttaaataaaaaatataatattaaagatgtactaagttacatagataagtatacagaagatatatgtatagagattgtaagacaaaatggaaaaatgcttatgtatataaaaaatcaaacagaaaaaatgtgtattgaagcagtaaaagagaactataagtctcttaagtatgtaaaagagcaatctgagagaatatgtaaagaagcattgaagcaaaaccataaagcaaaagagtatgtaaaaattgctattgatgattgtatataaggtgtagatacagccatcaatagtgaaagataaaaaaagataaagacaagtactttataataatctaggcttatactataattaattaagcagtgatataaattcacatgacgattatatcaaaatggagatgaattgatggcaaaaatatatttagaaaatgaaaataaaactagagaaataggatataaattaggtaaacttttaaaagaaggcagtgttatctgtttagtaggagatttaggagctggtaaaactacaatgacacaaagcttggcagattcattagggatagaagattatataacaagtcctacttttactataataaatgaatatgaaggaaaaatacctttgtatcattttgatgtttatagaataggtagtagtgatgaaatgtatgatattggttatgatgaatatgtaaattcaaatggaatctgtataatagaatgggctaatctaatagaagatatacttccaaaagaatatttgaatatagaattgagatataaagatgaaggaagagaaatgatattaactccaaaaggagagttttataaagagatagttgaggagttgattaaataatgaaaatactaggtatggatacgtcttctatggcagcaagtgtagcagttgttgaagatgataacttaatatgtgagtttacagtaaacaacaaaaaaactcattcacaaaagcttatgccaatgatagaaaatatgttgagtatgagtgatttaagtataaaagatatggatttattagctgtatgtataggtccaggttcgtttacaggacttagaataggtatggctacagtaaaagctatggcccatgtaaataatataccaataatagcagtaaattctttggaatctctagcaaataacataaatttctgtgatagaaagatatgttgtatattagatgcgcagaaaaatcaagtttattcagctaaatacaagtttgaaaatggagagatgatagaattagatggtgttgatgttgtagagtttgatgctttagtagatgaaattgtatcaactaatgaagaatttataatagttggagaagctgtatacaaatataaagacaagttagagaatataaaaaatataaaaataccttcaccagctaataatgtatctaacgcaggaagcttatgctctttagcattaaataaatataataaaaatatagatgtacatacttgttatacgataaatcctatgtatatcagaaaatctcaagctgaagtacaatatgatgaaaaaatgaagaggctaaataatggaagataatacaaaactaatagtagatgatataaaaatagaagaaatgactacagaagatatagatgaagtttttgaagtagaaaaaaattgttttgaagattattggtcaaaagagtcttttagaaaagagttgtctaatgaagtagcaaggtatatagtagctaagttaaatggaaaaattgtcggatatgtgggaatttggcttatacttgatgaagggcatataaataatgtggctgttcatagtgactatagagggaaaaaaataggggacaagttgataaaatgcatagttgatttatgtaaagataataatattgcatctatgacattagaagttagagcatcaaataaaatagcacaaaatttatatagaaaatatggatttaaaatgggtggaataagaaaagaatactacagtgataataaagaagatgcaattataatgtggaaccaattaaaagaggtgtagagtttatgagtgatataataacattagctatagagagtagttgtgacgaaacagctgcatcagttttaaaaaatggtagagaagtactttcaaacataatctctactcaaatcgagacacataaaaaatttggtggtgtagttccagaagtggcctcaagaaaacatgtggaaaatattgatatagttgttcaagaagctttagacaaagcaaatataggttttaatgatatagaccatatcgcagttacatatggacctgggctagtaggtgctttattggttggtctatcttatgctaaagcacttgcatatactttgaatattccacttgtaggagtaaatcatatagaagggcatctaagtgcaaactatatagagcataaggatttaaaacctccttttataacattaatagtatctggaggtcatactcacttggttgaagtaaaagattatggcaagtatgaaattttaggaaaaacaagagatgatgcatctggagaagcatttgataagatttcaagagctatgaatttaggctatccaggaggtcctattattgataatctggccaagaatggaaataaacatgctatagaatttccaagagcctatttagaagaagatagctatgattttagttttagtggattaaaatcttctgtattaaattatctaaatggaaaaagaatgaaaaatgaagaaatagtagttgaagatgtagcagcatctttccaagaggctgtagtagaggttttatctaataaagcactaaaagcagtaaaagacaaaggatacaatatcataactctttctggtggggttgcttctaattcggggcttagagctaaaataacagagcttgctaaagacaatggtattactgttaagtatcctcctctaattttatgcacagataatgcagctatgatagggtgtgcaggatattataattttataaatgggaaaacgcatgatatgagtttaaatgcagttccaaatttaaagataaatcagtagagttagatgaatttgtaaatataaaagtattgtttcaaaaaagtaagtagaagtgaaattaaatataataaaaataaatatagtatatattaaaacttgaagtaaaactatttataatctttatattccaatgaattgcaacaaattttaggatatacagattgtctttggcttagatttgcttcaagtttaattttttctatagaaagattattttaaaaagtgggtaatatacccttttttttcattcttaaaaagttttatactaattatagaaagattaaggaggggaagaaatgagtcaaagtaaagaagacaaaataagaagtattttggaagcaaaaaatattaaatcaaattttcaaaataaagaaaatttaagtgaatttaatgaaaaaaaagcaagtaaaagagcagaagacttattagatgtatattataatacattatctactgctgatatggaatttccatattggtataatagagaatatagaaaatcagatggtgatataccagtagttagaagagctaaagctcttaaagctgctttttcacatatgacaccaaatataatacctggtgagaaaatagtaatgcaaaagacacgccattatagaggttcttttccaatgccatgggtaagtgaaagtttctttgttgctcaaggagaacaaatgagagaagaggcaaagaaattagccagtaacacagctgatgaacttacaaaatttgggtctggtggaggaaatgttactgaaagttttggaaatgtcgtttcaatagctggtaaattcggaatgagaaaagaagaagtacctgtacttgtaaaaatggcaaaggaatgggttggaaagtctgttgaagatttaggttttcactatgaaaaaatgatgccagattatgatttaaaagaaaacctaatgagtacacttatatgcatgtttgattcagggtatacacttcctcaaggtagagaagttataaattatttttatcctttaaattatggattagatggaattatagaaatggcaaaagaatgtaaaaaggcagttgcaggaaatgcatctggagatgggcttattggtatggaccgtctatatttttatgaggctgttattcaagttattgaaggattacaaacttggattttaaattatgcaaaacatgcaaaatatttagaaagtatagagacagatttagaagctaaaaaagaatactcagatttagtggagatattagaacatattgcacataaacaacctcgtacatttagggaagctcttcagttgacttatacaattcatatagcatcagtaaatgaggatgctatatctggtatgtctataggacgttttggtcaaattttatatccttggtatgaacaagatatagaaaaaggactaattacaaaagaagaggttatcgaattattagagctttatagaataaaaatcacttgtattgactgttttgcttcagcgggcgtaaatggaggagtactatcaggtaatacatttaatactttatctataggtggattaaaagaagatggttctacaggagctaatgaactagaagagttattattagaagcaagtatgagatgtagaactcctcaacctagtttaactatgctatatgatgaaaagcttccagaagatttcttaatgaaagctgctgaatgtacaaagcttggttctggttatccagcctgggtaaacaactcaaatggaacaacatttatgatgaaacaatttgctgatgaaggtatgactgttgaagaagcaagagcatttgcattaggtggatgtttggaaacgtctccagggtgttggaaacagttaactttaaacggaaaaacgtactctattgcaggtggagcaggtcaatctgctggctctggagttcactttatagctaatcccaaaattttagaacttgttcttatgaatggtaaagaccatcgtatgaatatacaagtatttgagcctcataataagccattagatacttatgaagaagtcatagaagtatttaaagattattataaacaagcaataaatgttttagaaagagcaaataacattgagttagatatatggagaaaatttgatacttctataataaattcactactaaagccagactgtttagacaaaggtcaacatataggaaatatgggatatcgttataatgcaacattaaacgtagaaacttgtggtactgttactatggtcaattcatttgcagcacttaagaaacttgtatatgatgacaaagcatttacaatagaggaaatgaaggatgcaatattaaataattttggatttaaagatgcattagaagtaggaaattattctatggcagaccaagtaaaagtagataagactggtaaatatgatgctatttacaaggcctgtcttgatgcacctaaatatggaaataatgatttgtatgcagataatattcttaaaaactatgaggtatggttatcaaaagtatgtgaagaagcacaatctttatatgctaagaagatgtacccttgccaaatatctgtttctacacatggaccacagggagctgctaccttggctactccagatggtagactaagtggaacaacatattcagatggttcagtctctgcatatgcaggaacagataaaaatggagtatatgcattatttgaatctgcaactatttgggaccaagcagtagttcaaaattctcagatgaatttaaaacttcatccaactactataaaaggacaacaaggaactaaaaaattattagatttaacaagaagttatttaagaaaaggtgggttccatattcaatataatgttgtagattcagaaacattaaaagatgcacaaaaaaatcctgacaattatcgtcaattaatggtacgtgttgctgggtttactcaatattggtgtgaattaggtaaaccaatacaagatgaagtaattgctagaacagagtatgaaggggtgtaaaatatgagaaagcatagtgattgtatgaatttttgtgcagtagatgcaaccaaaggaatttgtagattatcaaaacaaatgattaatttagatgattcagcatgtccagagataaaagtaatgccaaaatgtaaaaattgtaaaaattttgttgaagctaatgatgaaggtataggcaaatgtgttggcctagagaaagaagactgggtatattcaacattgaatgcaattacttgtgaaggacatgtgtttaatgagtagtcaaaagcaattagaaggcatgattttcgatgtacaaagcttttcagttcatgatggtccaggttgtagaacaactgtatttttaaatggatgtccactgagttgtaaatggtgtgcaaatccagaaagttggactgtaagaccacatatgatgtttagtgaattatcttgtcaatatgaaaatggatgtactgtatgtcatggtaagtgtaaaaatggtgcattgagctttaatcttgataataagccagttatagattggaacatctgtaaggactgtgaaagttttgaatgcgtcaactcatgttattataatgcgtttaaattatgtgcaaaaccttatactgtagatgaacttgtgcaggtaattaaacgtgattctaacaattggagaagtaatggaggagtaacatttagtggaggtgagccactacttcagcatgaatttttacatgaagtattattaaagtgtcatgaggtaaatatacacactgccattgaaacaagtgcatgtgtatcaaatgaagtttttaataaaatatttaaagatattgattttgcatttattgatataaagcatatggatagagaaaaacacaaagaacaaacaggtgtatataatgatttaatattagaaaatatatcaaaccttgcaaattctgactggaatggaaggttagtacttagagtaccagttatctctgggtttaatgatagtgctgaaaatataagtgatattatatcttttatgcacaaaaataatttaatagagattaacttattaccatttcataggctaggagaatcaaagtggattcaattaggtaaggagtatgagtattctgataagggagatattgatgaagagcatcttgaagaattacaagatatatttttggataatggtatagcttgctatgttggtcatgagacagctttttaaaatcaaatacaagtttttttaattaaaaaaggatgttacactaaaagctagagttacatccttttttatgtggtttttatgtagaaataattaagtaaagttttatatgttttatatattgttcatattgctttatgtccataaatattactttaaatttatactttatatattttttatagtttaaattacagttagagaatatattacgtttactttattgaagcagaagttttgtggtaaaatactactatgaagaaatttaatagaatatattttagaaacaactaaaaataatagttaggaggaagacatctatatgaacaaatcatggagtaacttgattattaagaataaagacaaaaaagtacgttcagggtggattattataactgttatggctgccttttacatatttgagtattatttaagcactatacttatggaaataataagaaaaattctgattgctacaggtgacattaatttaaaaacaaactatttttcggaatatgctaattggttaaatgacgttgggttacaggttgtatttcaaattctaacagattcacttatgattattattcctataattgtatggagatttattatgaaaaatcctattagtgaaatgggattacattcttatagaattaagaaaaaagaaggatatgtaggaatgttattaggaatatttaattgtacagtaatctttattataacaataacaattggtggtggtcatgttacttcatgggtaccaaaaatttcacctttaacagtttcttggatacttgtctttattttagttgcttttgcagaagaaattttaaatcgtggtttttttatggcagttttacgaagatgtaaaaatatttattttataatgattgttccatctgttatttttgggttgattcatatatggaatcctgatgttacttttttgtctgtaattaatattataattattgggattcttttttcatatatgtttataaagtcgtcgaatatatggatgtgtataggttatcattttacatggaatgtatttcaggggattatatatggtatgcctgtaagtggacttcaggttccagggattataactacacaaatcactcatggtaatctattaaatggagggatgtttggtattgaaggtggaattttgactacttttgttaatctacttagctttatatttgtatggtattactatagagattctaagtatgattttgttagtgataaagtaaatgtgactaatatcaagaattagttgattataataaattttaataatatcttctaaacttaaagtattctgtaggattgttggaaatttacaaaaatataaaaataacttggatattctatttactccaagttatttttatattcttttgtaaatagaaatggaacataaaaaattaaaacaaccatagatactattagtatatcatggtaagtgatagttgattctttagaatttgtgataagaaaagcactattatttaaaacatgaattatagcacaaaaccagatattcttagtttttatataaagatatcctaaaaatattgaaattccaactatatgtattgaacgtaatattactcctaatattggcgcttcaggtgtatataatgtaaatattagtggtaagtgccacaagctccaacacatacctaatattatgactcctaattttttaccaaatttatcaaaaaaaatattctgtaaaaaacctctccaggcatattcttcactaaaaaaaatataaatagtagttaatgatgttattggagtaaatataaattttatgataccactataattaggttgagccccttgtagtattagtataaatgatgttggaacaattacagaaatcataaagtaaataattaataaagaacctagtttaatattttttacaggatataaattttttttatttgatgaatatattataattgataagctacttataaaagttaatattaggtttataattataaattcattattatttattagatttaataacttaagaacaattaataatgaataaataagaaaaaataatatgattagtgaataaaattcatacatatcattatttaatccttcagtataaaactttgcaatagcaactgaagatagaggtaatatcatcatgaatgatgcaaagttttctggatcaataaatttattataatataacagtaaacctaatgaataagttaaaccaaagtttataaagaaaaagataataatttgtattttttttctttttatttcatttttaataaatactgggtttagaatatttatccatattaattttaagttcattaatttaatactcctttacaatatagattcttaactaaattaaaatattttattgaatattataaattcatgacagtcaatattattgaaaagtaacttataaaattatatataaataataaaattaattttactatatacccatatatttagttatattgcaggcagaatgtggtttaccataagcaaaaggacaataaaaaatatttttctatatttttattatctttttgtaaaagatttattatttattgcattaaattaataggcagtagaggcatagttgataaaattaatgaagaaattaaacttatgaatataaatttattattgagttttaatattacatttattattctctttgattttaatattgtatatttaataattattacattcgtctggttaataaataataattaaataaatcaaatgattttaatttactatatgattataatataacgttgattttttatgatttcaataatttcctatatacaaaataatacaaaaaatttattaaaaagttagtttattattttatttataaaaattaggatgaatttgtaatgttaatatcaaaaaaataaatataaatatcaaaaataaatttatttaaaattaaaattttatttattattaaagagtaaatataattattagtaatatatatagtatttgtaataaaatatcaataattagaaagattatgaaaactaaattagaagaactaaaaactatatttttattaattataatatttgaataatctttttaatcatataaaatgcatatacttgtaatatttaaaggtgatattaatattattagtgtatattaatattcccttgaaattaaaaaaacatagatatttcagtaatctaaaatagtctacaaaaataacagttttagcaaaattaataagaatacatatagatttaaacctaaaagtatgaacatgtctgttttttacaagattaaaatttatattatatgataaaattaacttaactatttcaataagacttataatttttttctttatactagaccttattgaaacctttatagtttaattctaattatatattataaataaagtatgtgtatattaaggaggtaatatgaagtttttaaatgttttaatagtagttgaagatattgagaaatcaaaaaagttttattatgatattttggggttaaaggtaatctgtgattttggagaaaatgttgtattagaaggtaatatatcattacaagaaaaaaagctttggttagaatttattaataagagtgacagtgaagttaagttcaatggaaatgatgctgagttatattttgaggaagataattttgatacttttgttgaaagattgagtacaatgaaaggtatagattatgttcatctagctatagagcataggtggggtcaaagagcaattagattttatgatttagatgggcatattattgagattggagaaactatgtcatctgtgtgtagacgttttttagatagtggtctttcaatagatgaggtagctaaaagaatggatgtaactgtcgaatatattgaatcagttttagaatagatggattatattaaagtaaaactatattttgtatagaagtaagggctgtaagtaaacttgtatggaaacaaatttacttacagtttttgtttttgtaagatacagaatataatatttgttataattttatttggatttttaaaaagtgcatgattttccttacatattataatagaatttaatatttattggatgatttaaatttagaaaaatataagtattagcttataaaagataattatacttactatcaagctgtagaatcatatatactattttatgtaattatgttaaaatttaattgaacaaattaaaaatatagtgaaaattgtagttttagtttatttatttaataaatatttcaaataaaataatgtttaaataagaaacataaataataatattattattgttcttaaagacaaaaaatcttagcttaaaaatttgtatcatataaaatccctacatattatggaagtaatgatacattatatgatatacacaataaagtataaaagtatttacatgttttttctatatattttataagttttaggtatggaaaattactaaataaaaattagattaatgattatgatagtatagataaagtttattctttttattaatagaaattgttgtataaaaataataaaagtgaggagagtgatatttaaataaaaaaattttaataagtattggtaatatagtttttagggatgattattttatgtaaaaagttgttatttgtaaagataaatatagaaaatattataagtattgatttagtgataatctaaaaggtgagaattgtaataaaaagagaacatatccttcaaatggatgtaaacttataaataacattattacaagagatttattatacatatactgcaactattaattagaatttatactgtatttgtatttaaataaaaacacaaataatattattgtaaaaatttataattattaaatatttaaagtataagatataataattataagtaatttatgtataaatgtataaaatatagatatatttagattaaataataattattattatacaaaaattttgtattaaaaaatatctttaaatttgaaatataataaatgttagatagaattttataaaatttaaaataaaaaattatataaggggtgtaatatgattaatattattatttgcgaaggtaaaaaatcagagagggtaattctaaatgattatataaatacctttttttataattacaattttgaatacaatatcaaagagtttgaaaatggaggcgatttattaaaaaagtatcctaataatgttgatatcatatttatggatatagacttaaatgatgaaaatggatttaatgtttcaaaagaaatcaaaaaatttgatgaaagtgtaagaattatatttgtatcctcatcaaataaatacataaagaaaggttatgagataggagtttatagatatttagagaagcccttaaaatactctctatttaaagaagcaatatcatcatatttaaaagaatgctacaaaaatgaagctattttatctataaaatgtaaatgcaagatatatttcataaaggtagatgatattttatatttagaagttttaaaaaatgatttaactatacatactgaaaaaggaatatatacttttaagaatagtatgaaagaaatagaatcaaatctagaagaacataatttttttagatgtcataaaagctaccttataaatttaatgaaggtaaatatgctagatatagaaaataatattgtatttataaatcaaaattcaataattgtaagtcgttataagataaaattattgagagaaaagttaaatagttgtttggtagatgtaataatttgaggtaaatttttgcccttatattctattctaatagaatatatctattgtaaaatatgaaaaaatttataataaaaactaattatagttaaaaatatacctttcatcaataacagattgaatatattaagattttattttacaattctattaacaattttattttaaagatttaatttaaaatttaaatatgtattatacataataaaataatgttatattatattaattaataaaatattttatttcaattttattaagtatggaggtgtattgtggaaaatggtaaatttcaattttttaaaggtgtaagaaattgttttaatatgatttatctacatgataaaagatatttatttatctctatgtttatggcaatttttcaggggattgttccatctatttctttgttagtaagtcaaaatatcattaataatatgcaaacattttcgaaaagtgtaaaagaaatattagttttgttaattatgtatttaatcataaatataattccttcaatttttcaaagtttttatggatattatagaataaagtttaataaaaattttgaaaaacatattgaaacaatgatgttagagaaatctttaactttgagtttaaaagattttgaggatgataatacttatgacatgataaatagagctcaatctcaaaaaggatttaatattactatactatctgaaaaccttatttcaataataagagaatcagtatctacactttctcttattgttgtattatcacaatttcaactttggctaataatagttgttattgttattcctgtattgaaatcattatattccattaaattaggaaaggaacaatatgatgttagtgtaaacagaacttggaaagaaagaaaggcctggtacatagattatttgttgtcaaaaggttatgcttacaaagagattatggtatttagaattggttctaaacttattaatcattataaaaaattaaaagaggatattatatctcaagatatgaatatagctaaaaagaattttattgctacgctattatgtacagttttagattcaattgtatctgcaggaattataggatttataataattcaaggtattttaaagaagattttaataggagatgcgactacatatatacaagcagttcaatctataaaggataatgttgaatcaatattttcgttatttagttcagtaatacaagatcttttttatacagatttactgtttaaatttctagattataactgtaaagaagactcaattgaacatataaaaatatttgaaaaaataggggatataaataaaatagagttaataaatatttcatataaatacaatcattcatcagagtattctttaaaaaatattaatttaactttaaataaaaatgatcctattgctatactaggaaaaaatggttcaggtaaaacgacacttttaaaaatattattaggtttttatgatgattatgaaggtgacatcttgataaatggaaaaaatttaaaggatattgaaaaagatgaatacattagaaaagtaagttgtatgtttcaagattatattaaatatgaggctacattaaaagaaaatgtcgccatgggagatgtatataagagtaacttggaagaaaaagttaaaagtaaacttaaagaaactaaattgaaaccaagtatttatgaggaagatggattagaaactattttaggaacctggtttggtaagaagcaactttctatgggtgaatggcaaaaagtagcaatatctagaactcttatgaaagatgctgatatgtacatttttgatgaaccagattcatctttagattctgaagcgggaaatgaactcctttctttatataaaaaaacatttgaaaataagattggaatatttataacgcaccatatccaacatgcaaaaaagataactaacaatattgtagttcttgaaaatggaaagttgttagaaagtggaagacatgatgaacttatggacaaaaagggtgtttattttaatttattttgtaactgcaaataaatattaaagggaggttaattaatgaatcaaaaaccatttatacacacatttaaagctggaaaatcatattttatttatgatgttaatacggataagattttaaaggtaaatgctgctgtttataattatctaaataaaattgagcataatttagaaaaagaaagtgactggaacatagaaatagaagacgaaattaataccttgattaattatggatttctaaaaaataaaagggtaaataaaacaatgcaccctgaaactaagtatataaaatatcatatagaaaataatctatcctctattattttacaagtaacccaaaattgtaatttacgttgtgactattgcatttattctggttcatacagcaacagagttcatacaaataaaagaatgaatatagatgtagcaaaaagaagtattgactatttgattaagaattctagtcaattaaatgaagttagtgttggcttttatggaggagaacccttacttgagtttgatttgattaagcagatagtagaatatgtaaaagtagttggagaaggaaaggaaatatactttaatctaactacaaatgcaactttatttaatgaggaaataatagaattctttgtaaaaaataatataacaactatgattagtttagatggaggaaaagaaattcatgataaaagtagaaaatttgcaaatacaggagaaggatctcatgatgttgtattaaaaaatgtacgttacataaaaaataaatatccagaatattataaaaagaatattacatttaatacagtgataaattcagaaaatgattacatttctatagatgattttatatctaaaaatgagactttaaaagattcaaactttttagcttccactcttaataataactattctgataaagaaatagtttcatcagatgaatatatattaggtaagagttatgatagattcttgactttactcaacaaattaaaatttataaaagatgagagtatgtcacctttatcaagaatagaaagagccttattagatgattttagatatgagaaaaatattgaaggtagattagagttaccagatgtgtggcatcatggtggaccatgtataccaggggcttttagaatatttgtaactacagatggagaattttttccatgtgagagagtaagtgaaagttctaaaatgggtatgattggaaatttagatagtggagtagatatagaaaaggctgaaaaacttttaaatataggaaaattatatgaagagcaatgttctgattgttgggcctatagttattgtgatatatgtatagctaagattgatgatactaaatgtaatgaaaatgaaataaaaccacatgattgtgacagaattagacattctacagaaaataatatgaaagattactgcgttttgaaatctctaggatatcaatattaaattttctaatgaaaggaaagatgggattatggaaaaagtacttatatatccatttaattataatttttttactattttaaatcattgcaataaaatttcagatatagaaattaattcactggttagtccttctggctgggggttatgcaataaggagtataatgttaataatattattactaaagttacaaatgattttcaaagtgaacttaaaaagaattctttggtatggtttgttgattcaaaagaaaatctagacttagaaaaatttataattcctaaattaaaagtagctctaaaagaaggtaaaaagatattatatacacgtgatgatcttaataaaatatctaggtatatatctcattatgaattcaaaaagattaatgaatggaatttagaaaaatatgaaataagagatatagagggtatatcacagataaacacaccaataatatttatttgtggtctttatggagggttagatacttttgatgtaaatataaggataggagaagaactaagaaaaagggggttttcaatattacaatttggtcctaaaaaagagagctatttatttaaaatgattcctataccagagtttatgtttgatgattcgataagtagtaagacaaagattattaattttaaccattttataaaagataaagaggtagaggcaaagccagatttaataattatagaagttccaggagaattattccctttctctagaaaaatggttggtaattttggaattagagcttttgaaatttctaatgcagtaataaatgattgtggtatattatgtattccatcaagtatatatgatagagaatattgtgaagaacttaaatattttattaaaggaagacatggtataaatatagattattttagtatagagaaaaaagttatagatacatatgagacagaggtgaagcaaaaattttcatatatgtcattagatgaaaacttttttgttgaagatatagaagattatgaaaaaacattttttatacatgataataaacaattactagaattagtggacaatatagtgaatcaattaaaagagtatgctaaagtaatatctatttagaattggaggttaattatgaattacactgaaaaggaattactactagagaatatattttttgatgtgactggaattaattttaataaaaataacaatttaaaaaaagaattatttttttcaccgtctttacatatacagccaagagaattacttttagtattttgcgaggtaatagaaaactttaatataaaaattccagaggaaaaacttttgaataggcaatttacgagttttgataatgttctaaaaataatcaatatggtataggttaataaaggtataaagtaagtgatcttatagaaaaggggaggatatgaatgagttttggaaaaagaatagaaatgaataatataggtgttgagacaagaggtgtttgtactattatgtgtccttatacttgtaagatgatggcatcttcatcttgtaactgcaagaataatgattataatgcaagaggaggatcatataatacatattataataaattgatacatggtcaaagaactcctgatggaatgtaaatatttcagtaataagtatactattaaattgatttagcatatttgattaaatttatctttcttactttatttccttttattataaaaatatgcagttgattataattaagagtgtgattttataataactgcataaatagtatctgttatataaatcacctcttcaattattatagtggtaaatatagtgattaggggtgatttttacaatttaaaagtataaattaattaaaagttattataataaattatacttatttaaatagtaagaattaaaagtaaagtttttaaatatatttgtaaaaatgtatatatattaataatattgattagaattaatatattatttcaatatttaaacattatttattggtactaatttccaaaatagttaattggatatacaatattattataaaaaataaatattatttattttagattttagaaattgaaatttccttaagtgaaggaggtaattagatgattagtatgattatgatgcttattggagtattatttatagtgtttgggataattttaactgctgtcgaaataaaaggaaaaatgccaggtttttatggagttgggcaaaatgcagtaagaaaaaatgctatagggattatagcagcaggtatagcattaattttttttagaaatgggttagatagtattgattcaattcttacctatggagtatttttagtgatagagttagtagtaataggattatattttcttataagaataaaatatgataaagatgggaatctttaaagtataaattaataatattttgattttgatatatgtttatataaaaaaattgtagataaattttataaaatagttttatctacaatttttttatatttattatattttatgagaagtaatagtataaaatattattgaattttttctctcgaaatatataatttagaatcttctgatttatttttatgctcgatttccttattttttttcataaatatatatagaggagctattaacaacattgcccctaatcctattaagactctattttgagttataggttttgaaatatcttctgcccaagcttgttgtaacaaccataagctacctaaaatagctaccattggtataacaggaccaaatggaatcttaaaagaggccttaacatctgttctttttcttaaaactattactgataaacaagttggtatgtactgagcaaatcttgcaattacactcattactgcaagttgttcaaaacttccagttagcacaagtggtatacaacaaattaaagatattattattgctacatatggagcaccatatttatttgtttttcctataaatgcaggaagagaaccttcttctgctagagaagaaccacatttaggagttactattgatgaacctatatttataccaaatatagatattaatgttgctacagatatgaaaactttaccataattgcctaaaaatacacttgaagcatctgcaattggaatactgttttcaaatagtctatctccaagtatacccatacagacaatttgaattaatatataaattattgcacatataaatattgtggttattaatgcgattggaagattttttttaggattttccatttctccacttgccacaataaatgattcaaagccggtaaatgcgtaaaatactaatataatggctggacccatactagagttaactacatttcctgaaggaacaatatttacaaattttataaagaatattccaactatcacaaaaactattaatggtactaatttagctatagttattacattattcattatctttgtgcttttaattccaaataagctatttattgaaagtagtgttacgagtattgcagctatacaacctttgtattcagtggcagattctggccaaaatgaacctaaagctgttgcaaatcctactgctagagtagaccatgatataattctaataaaccaagacattgtaccaacttcaaatcctataaaatctccaaaagcttttttggagtatagatatgctcctccattcttatcaaacatgcttccaacttctgcaaaacataaaagtattgatagaactaagagtgtagcaaaaatgtatataaacatactgttttgacctgctagactataaactttacctggtagtaagaatatacctgaacctattatgctattaatccctaataatatcatactaaatagacctaatttcttagctttttccatattaatttatctcctattcttttattaattactgtactaattaaaatacaaagtattcattacatgcatcataacacctattggtaaacaatcttcatctatattgaagctagaggtatgaagaggtgaaattaagcccttttcctcatttttacatcctaaatggaagaatgctcctttacaatgttctgtgtaaaaagaaaagtcttcaccacctaaagacgggtttggtctcaatataaatttttcctctccaagtaattctttagtacttgatataactgtatctactaattctttttcatttataacagcaggatagttttcatcacttacatgtaaagtcccaacacaaccaaatgcagatgcagtgtctccaacaattttagctattttatcaatcataaagtttcttgttttgctatttaaggttcttaaagtgccttctagttttacatcttcacatattacattgtgtgcatcaccaccatatattttacctatagtcaaaacggcagcattatttggttctaagtttctacttattatagtttgtaatgatgtaacaatttgtgaagctgtaactattgcatcaataccattttcaggatatgcaccatgagctcttttacctttgatacttatttttatagtgtctacactagcatttaatgtatcatattttgtttcgataaggcctgtttctatatgtggcataacatgaagtccgaatatataatcggccttggggttttctaaacacccatcctcaactaaaaattttgctcctccaaaaccttcttctgctggttgaaataagaattttacatttacattaagtttatcttttattgaatgtaaaactttacatgctccaagtagcatggttgtatgtgcatcgtgaccacaagcatgcatttttccagaatgtattgatttataaggtatgttgttttcttcttcaataggaagagcatccatatctgctcttatacaaatcgttttatctgcactttcttttaaaatatatgccataattccattgtgttttgtaaattccatataatcaattccgatttcttttaaataagaaattaccttctgtttagtaagattttcttcaagagctaattctggaattttatgtaattctcttcttatgtttataagccatggttttatagaattacaactttctattacaaaatcttttcctaattctttggtttgatattttaatttcaaagcctgttgcatttttattcctccaattgctttttattgttttattaatataataagcaattattatgccataattttcgatggagaattttgttttttataagaatattgaataaatataatcatttatctatatgtatagtataaaaaatgattgcatagtttcaattttcagtaaaaaatattattttgaagaaaatatattttatatgctagtttatataaaaaaaataggaaataaaaaaattatcctattcctattaattcctattatttatgtacaaaataaattataattttagggtacttgaaaaataaaaaaacctattgaaggagtactttaatcctgaatagatttctttgtttgataaattataattttatagacctttatattttaatttattgtaaaaatcttctcctttttgagttattttacttccatatcttcctgaactacaaattataagttcttctttttttagatattcaaatatttttttaatttttccttctgtaatttgaaggttcttatcgagtagtgcttttaaaattaatcccctaccaataccaacatctgattccttatttaaaattagtatctctaatatattcaatatatcattcttactatattttagttttaatgatgtatttttgttatctgaagaccttaagtttggaggtaaatctttctctaatacaatatcttcacacataatgtttaaataggatgtaacattttggagttctcttatattacctttccacatatagttttgtataagtttttttgcttctggtgtgattactaatttcttattaattaaatcttccataataattaatatgtcttcttttctttctcttagaggaggtatatttattggaattgtatttaatcgataatataaatcctctctaaattggctattatcaatcatttgttctaaattcttatttgtagcagatatgattctaacatctatattaattacattgtgagacccaacaggcattatctgcttctcttgaagaactctaagtagttttgtttgtaattctaaaggcatatcgcctatttcatctaagaatattgttccattattagcaagttcaaataatccttgttttccatcttttagacctccagtaaaagttcccttgtcatatccgaatagctggctttctaataaattttcaggaacggctgcacaatttactgctataaaaggttgattttttctatttgagttgttatgtatagactgagctatgagttctttaccagttccactttcacctctgataagtatgcttaagtcagatttagaaaccttcttagctaaatctatacattcaaacattttaggactatttgtttttatatccttaaatgtatattttgctatttgtcctttttctcttaattttttagtgagattttgttctaatttttttatgtatgttatttcttgtaaactataatatgtgcccattttttcatccctattgtatatgttttttttatttacatttatatatttcttattgaatacgacaactttatctagtatctctttctcactcaataaaacttttaaactatctacaaatatatcatcaatgtattttccatatatatcctcatttatgtctaaaatatcttttactttactattatatgtatttatttcaccatcttttgaagtaaataatataccatcttttgataaattcaatattgtatctaattcttctatttttaaaaataattccttatatttatcttttataccagtatctaaacttattatttcttctgagtatttaactagattagattgtatttcctttgaatcaatttgtaataaatttattatttctataaatgtagaaatatctatatatctgtgacctaaatcaaatatatctgagataaagctaggtactttttctggaactcctggagttatagctatttttatatttttatagttattatcattcatatatggaattggtctaatattagtcactccaattttataaaataaacttatagtttctagagtagtttcatcagaatcatttacgattagagcatttgtaccctgtggtaaagatagtagattataaattttatcttccctaaaagttcttcttaccacaatcacttttttcttatctagtatattatttataattttgtctaatctttctactgacattactaatatcacatcatcatttataatatcattatcatttatttcatttatgaagtatctattaatatttatagaatctccaaaaactaatttcaaattattttctaaaaagtctattaaatcttttctactatcatttaccagagctactgattttttcatttatttctccttatataataaatagtttccaacaaaatagttgtataaagcaatgtaattttgataatttaaatttatcaaataaaaaagaaagtgtctataatgactttataaaagttgcattaagacactttctttcttataattaaaaatcttgtcaccaaatccccctaattgttgcttaaaacttaaactgtatgtatatttttcatttctattcgattaaattataatatacacccaaaaaaatttattttaataaattctattgataatataattttgtaaatatagaattatattaaaataaattatatatgaaaatatatatgtataagtttattctgcgtgagtagaatgaatttgtcaagtttaatttagttgtaattgtatcttttattaaaaataatataaattaaaacatataaataaaatattttatacaatatattgtaaaggaggtaactttgatgaaagcagaaaaaacaagtatatatccaattattaaaaataatttaaacaaaatatcaattgttgaatataaaaagggtcaaagatttgtagcatcagataaagacttacaagaagtgttctttataatagagggagttgcattagtggagtgtactactagaggaggaaataaatttcttgttgacattgtacctgaaaatgaatttataggcaaaatcagttacatatatgaacataatttgaaatgtgatatatttgcaaagaccaatataaaattatttcgatttgaaaaaaatgtatttgaagagttttatctcaaaccagattttattgcactatttcacagaaaatgtacaagaagaatatatgaattatataaaaccagaatggtaagagaactattttcttgcacagaagttattgcctattgtatatcaaataaacaagaaaataatgtctgcaatataaaagctattcgtaatttcagtgaaatctattcaattagtagaaaaagtagataccattctctgctaaagttaactgaaaaggagatagtaaaaaaaatgggtaatacatatgaaattttaaactatgatgaattacataaattggcatttgaagtaaaagagtttttggaagatgagtaaaaattgttacttaatcaaaataaagtataataatttctgtaaaaaatagaaatagtctcactgaaaatcaaaaatactttagttattttcaatgagactgtttagaaatattgtatacttataatgtatagtataattattaatcaatttcctttactatattaatagcccattttttagataatgctctaggaacaccaaatataaacttaaccacttcttcactataagtgagtaaaacgagtacaaatataggtgcacctttaaatgcagctataaaagttagaggaatagaagctaaccacatacatcctaattctagaaatagagcatatttagtatctcctccacttcttaaaataccaattataaccaatgtattaaaagatttaagagccattagtattcccatgataaagaatatcttagttatatcagaagctaagctatcagaaacactaaacatttttaataataatggtatatttaaaattaaaataattccaagtattaaaccagctgaaaatacaagtatagaaaactttttagcatattcaatggctcttttaatatggtcagctccaagttcatttccaagcataatagatgcaccagatgcaatacatacagctgtcattatgaagaaattacctgtactggttgctatctggctagctgctatagcagaagtaccagctcttgcatatgcaacagaatacaggacagttccaattgcccatacagagtcatttacaaatataggaaagctttttgatgaaaaagattttataaaaattttatcaatagcttttagattttttagaccaaactttaatatatagtcttttttataaaggtaaacataagtaatcattaaaattaattcacatattctagcaataacagtagctagagcagcaccttttacacccaatgcgggaagaccgaagttaccaaatataaatccataatttaaaataacatttgttacaagtgcaaatgcactacaaatcatacctaacttaggatttctaacacctcttgaaccagtactaaatacagtacttacagcaattaatggataactaaatactgcaatactaaagtaatctatacaaagttttaccacctcagaatcatacgaaaatatgtgtataattggctttggtgttagtaaagcaggaataacaaatacaaaacttaaaacaattgccaatacacaagtaagacctgtgacttttcttatattactcacatccttctttccataaaactgtgaaataaaaactccagcacctcctgtgataccagataaggacatattaaaaagaaagaaaaattggtttgcaactccaactgaagctacagatgtctcccccaaactacttatcataattgtatctattacatttacagaagtagaaattaagttctgtatgataataggtatacataaagatagaagtattttataaaatcttttattttcgtcttttaaagaaaatagttcttgcaaataatcctctcctttttacataaattcttcccactcatcatatagagaggcaaggttattttctaaattaattttttcttggctaacttctttagctttatctggattagagtatacttcttcttgacataaaagtatatctaatttttcaatttcaatctctaacttttcaatttctttttctatattttgtctttttattctatttttcttttctatttctctttgttctctctcttttcttttttcatcttttatttgagttctagttttttcttctttttcttctataatactcatctcttggatttgcctttttttatctatataataatcataatttcccagatattcagtaattccattttcatctaaaactaaaattttatcaacaacagtatttagaaagtatctatcatgtgatattgtaaatatagtcccatcataattagttaatgcctcttcaaggacttccttagaatcaatatctaggtgattagtaggctcatctaataacaataagtttgcatttgatagtataagtttaagtatggcaactctagctctttctccaccactcaatgtagaaatcttcttaaaaacttcttcatctacaaataaaaatgcccctaacatatttctcaaagtagtttgagtaagatgagtattattttcccaaatctcatcaattattgtgttatctaaattaagagttttttgttcctgatggaagtaggaaacatgtacattagttccaaatttaatattgccactaagaggttgtagttcattagttattattttaaataatgtagatttgccaacaccatttgcacctataagtgcaactttttcccctctatatatatctaaatccaagtctttaaaaagtattctttctccataacccatagatacatctctaatttgaagaacatcattaccactctggacagaaggcgtaaattgtatacgagcttttttcctataagcttctggtttatctaaaacgtctaccttgtctaatgctttttctttacttcttgcacgctttaggtgtttttctctaccataagcttttagtctttcaattgattcttcttgcttttttatttctttttgttggtcttcaaatttcttaagctctagttctttttctattttagataactcaacaaatttagagtagttaccattatatactttaagttttttgttgtgaacttcaaaaattctatttacggattggtctaagaaatatctatcatgagatattaacatgacagttcctttatattgttttaaaaatacttctaaccattctattgcttcagagtctaagtggttagtaggttcatcaagtaacaatagagttggtttcttaagaagtaattttcctaaaagaactctagttttttcaccaccagaaagtatgcttattggcttatccatatcattgtcactaaatcctaatccttttagaactcctttggcttcagatttatatccatatccatttaaatctgaaaataattctagtttatgtgaatattcatccatgattttttctataattggagagtttgtttttgtactttcttcagatattttaacctccaattctcttaaataggattccatttctatcaaatttttaaaaacttctagcacttcttccaaaatagtattatccgaataaaaattggtattttgttctaaatatccgatttcacaatctttagaagtataaatatctccactatcatatccataaattcctgaaattattttaaataaagtagtttttccagtaccattaacaccgattataccaattttatcgccttcatttactgtaaaactaatattttctaatatagaatctataccaaaacttttatttaagttattacatgacaaaacaatcataaatttctacctccttgaactatctaaaattataatgttttgatataatataatcaaggttatatgtattagttttgaaaaagaaatattttattgtgaatcaaacaaaaaagaggacacttttaggaggtgaagatgttgggaaataaaaatatatcaatggcagttataagaaggctcccaaaatatcatagatatcttggagacttattagatagggatatacaaagaatatcttctaaagaattgagtgatataatagggtttaccgcttctcaaataagacaagatttaaacaactttggtggatttggacaacaaggatatggttataatgtagaagctcttcatactgagataggtaaaattcttgggttggatcgaccatacaacgcagttcttgtaggagcaggtaacttaggacaagctatagccaattatgcaggatttagaaaagctggattcgagataaaagctttatttgatgcaaatcctagaatgataggtttaaagataagagagtttgaagtattagattcagatactttagaagactttataaaaaacaataatatagatattgctgtattatgtatacctaaaaatggagcacaagaagttattaatagagttgtaaaagctggaatcaaaggtgtatggaattttgcacctttagatttagaagttccgaaaggtgttatagttgaaaatgtaaacttaacagaaagtttatttaccttatcgtatttaatgaaagaaggaaagtagacaacttaaacatattaataatgagcagttgtgaagagtattgagaaagtcagaagatttaatattaaatcctctggctttttgaaatattaggataaaaatttaaataatgtatggaaataaacaatattaaggagagtggtttttgtggaggaattatggaaaaaggcaattgaatttcatggtcatgaatgtccagggttagctataggatttaaagcagcacttgcagcaagaaaatatttaggatgtaaacagtcaggagatgaggaaattgtatgtatttctgaaaatgatgcttgtggaatagatggtatacaagtcgtgctaagttgcacaatgggtaaaggaaatttactacttaggatgactgggaaatcagtatatcatttctttaatagggaaaatggaaaatctataagaatatatgtaaagtcaaagccatttcaaatggatagagaaggatacaaaaagtacttattagaaagtgattttgaagaaatatttgagattacagatactaagttaagacttcctgaaaaagcaagaatatttaaatctcttaaatgtgaagtgtgtggtgaatttgcatctgagcaatatataaggattgaagaaggaaagaaagtatgtcttgattgctttaataaatatgaaagattttatgaggagtattaaaattataaattagattaaagttaaaagtattagatatgtactaacagtattttaagatgaattaggtagcaacataataaaatatataaataatattacttgaaccatacataattaaaaagaggctgattagtatttagaaaataaaatcagtctctttatgaataacgaattattattctggttgaggtgcatctacaggacaagctcctgcacaagaaccacagtctatacaagaaccagcatctataacatatgcgtcgtctccagctgatatacagctaacagggcattcagcctcacaagcaccacagcttatacaagcgtcagtaattttatatgccattttgaaatcctcccttttatatgtattgtaattcaataacattataacaaatattattgaatataacaattaaattaattctacaacaaaaactttattatgatattcttgttttaaagttttacaataaagtttaatctgcttatatttttatttattttaaagaagtttattttaaaaataaaattaaatttaaaaagttatgtattgattatatttaaaaatgttatactctaaaaaagtatattttattttaaaatttattaatacaaaggagatttactatgaaaaataaattagtttacatatgtattatgagtctattgctatttgtagtaggatgttctaataatccaaataaggaaagtaccattaaaaaagactctaagaataaccaaagccaagttaaagaagaaaaaagagaacctgtgaaaaaagatataactataagtttcgctggtgatgtaactatggggaactataaaggttcatcatattatggcagttttgaccatgaatttaaaagacaaggagaagattacaattattttcttaaaaatgtaaaacctgtatttgaaaaagatgacttaacagtggttaatttagaaggtccacttactacagcgtcaaatgcaaaagaaaaaaaatttgcatttaaaggaaagcctggatatgtaaatattttaaaatctggaagtatagaggcagtaagtattgcaaataatcattcagaagattattttgaagaaggaatgaaagatacacagtttatattggatgagaataaaataaattattttggattagggaaagatgctgttgtagatgtcaaaggaattaaagtgggtctattagggtataatggattatcaactgaatataatgaaaaaaatttaaaacaaatggaagatgatattaagtccttaaaaaagaaatcggatgttgttgtagtgtactttcattgggggatagaattagattattatccagataaaaaacaaaaagattttgctcattatgctatagacaagggagcagatttagttatggggtctcacccacatgttattcaaggaatagaaaagtataaaaataagtatatagcttatagtctagggaatttttgctttggaggaaataagaatccttctgatacagatagttatatatatcaacaaacctttactttttcagataataaattaacttcaattaaagagccaaatataataccaacctcaataacatctagtagctccagaaataattatcaaccaaaagtattggatggaagtgagaaggatagagttttaaataaacttgaaaaaataagcaaagatttaaataaataaaatgtaaaaaaaaataaatatatatatttattttaataatttatattttgtttagggtatggtaaatcgtggtattaaataagtagattttaatagttaaattatagtcaattataataaagctatttaatctacttttttaatataaaaatataagggggaatttgtaatggcttgtaacacttgtaaaatgtgcgaaagtgcagacaagaaattagaaagttttgtagcttcaaaggatgttgaaacagcatttcatagaacagaagatcagaaagttaagtgtggttttggacttcagggggtttgttgtagactctgttcaaatggaccatgtagagtaactcctaaatcaccaagaggtatatgtggagcagatgcagacactatagtagcaagaaactttttaagagcagtagcatcaggagcagcttgttatttacatgtggtagaaaatacagctaagaatttaaaaaatgttggaataactaaaggtgttgttaaaggagaaaaaacattaaatcaattagcagagatgtttggaatagaaagtgatgaaaagtatgataaatgtataaaggttgcagacaaagttatcaacgatttgtataaatcaagagatgataaaatggaattagtagaaaaaatagcttatgcacctagagtgaaaaagtggaaagagttaggtataatgcctggtggtgcaaagtcagaagtttttgatgcaatagtaaaatcatcaacaaatttaaatagtgatccagtagacatgctagttaattgtttgaacttaggtatatcaacaggattatatggtcttacactaactaatcttttaaatgatgttatgttgggagaaccagttataagaatggctcctgtaggatttaatgtaatagacccagactacataaatataatgataacaggccatcaacattcaacatttgcaaatttccaagatagattaaaagatgaagatgttataaaattagctcaatctgttggtgcaaaaggctttaagctagtaggatgtacatgtgttggtcaagatttacaattaagaggagaacattatcaagaagtatttgctggacatgcaggtaacaattttacaagtgaggctgttttatcaactggagcaatagatatagttctttcagaatttaactgtactataccagggcttgaaccaatagcagataaatataaagtaaaaatggtttgtttagatgatgttgctaaaaaagcgaatgcagaatacataggtttagacagaagtaaattagatgaacttagtaacactttaatagaaaaagcattggagtcttataaggagagaagaggaagtattgagatagatataccaaaagaccatggatttgaacaatctttaactggtgtaagtgaaaagaacctgaaagcgtttttgggagattcatggaaacctcttattaatttaattgcagaaggaaaaattaaaggtgttgcagctgttgtaggatgttcaaatatgacagcaggaggacatgatgtaaatactgttgaacttactaaagaattgattaaaaaagatataatagtactatctgcaggatgttctactggaggattagaaaatgttggtcttatgtcacctggagcagaagaattagcaggagaaaacttaaaagaagtatgtaagactttaggaataccaccagtattaaactttggaccatgtctagctataggaagactagaaatagtagcaacagaattagcagctgaacttggaattgacctaccacaattaccattagtgctttcagctccacaatggttggaagaacaagcattagctgatggagcgtttggtcttgcccttggcttacctcttcatttagctttacctccatttataacaggaggaaaattggtgacagaagtattaacagaaaaattaaaagacttaacaggaggacatgttatagtgaatccagaccctaaatcttcagctaatcaattagaagaaataataatagatagaagaaaaaatttagggttaaaggatgtggaatgcaatgcatagaatttttataaataaagatttatgtacaggatgtaagagctgtgtactagcatgtatgctaaaacacaataaagattatgacatgtacactcttgatttagaaaatatagataatgatagtagagggcatatagaattagatagtaaacataataatccagttccaattctttgtagacactgtgatgaacctgaatgtgtattagcatgtatgagtggtgcaatgcataaagatagtgaaagtggaatcgtttcatatgatgaagagaaatgtggttcatgttatatgtgtgtaatgtcttgtccatatggattattaaagccagatgatagaagcaagcaaaacatacttaaatgtgatttatgtaaagatgaggagtatcctagatgtgtagctaattgcccaagtggagcaattgaattacagaaggaggaaaatgatgaattatgtagtgttaggggctagtgcagctggtataaatgcagtaaaaacattaagagaattagataaagattcaaatatagtagtaatttctaaagatgaaaacgtatattcaagatgtatgttgcatcacgttatatctgaacacagaactttaaaacaaataaattttgttgatgaagattttatggagcaaaataatgtaaaatggattgcaggtaagactgttaaaggtatagacataaataaaaaggtagttcaaacagaagacattactgtaaattatgataaacttttaatagctacaggtgcatcttctgctattcctcctataaaaaatttaagagatggaaattttgtatattctgtgagaaacatagatgatatttataaaataaaagaaaaagcacaaaattctaaaaatgtagttataataggtgctggtttagttggtatagatgcattagtgggattatttaaatatgagcagttaaatatttctgtagcttttatggaaaagtacattttagatagacaattggatgaatatacagcatcagtgtatgaaaataagttcaaagaaaaaggtgtaaaattttacccaagtgcatcaatacaagaaattgtattggataacagtaaaaatgttacaggtgttgcattttcaaatggtgaagttttagatgcagacatggtaattgtagctacaggggttaaaccaaatgctgactttttagatgggacaggaatagaatatgatagaggtataataatagatgatatgtgccaaacaacacaaaaagacatatatgcagcaggagatgttgtaggtaaaaatgctatttggcctctggcagtaaagcaaggaattgtagctgcctataatatggttggaaaagataagaagatagaagatgaatttgcttttaaaaatagtatgaatttcatggatataccaactatttctataggaatgaatacacctgtagatgatagctataaagtattaaccagacatggaattaatgattataagaagtttgtttttaaagataatgtaatctacggagcagttatacaaggagatatttcatatgtaggtgtattaacttatttaataaaaaataaagttgaaatatatgatttagaaaataggatatttgatgtatgttatgcagacttttttaatataaaagaaaatggagaattttgttatagtgtatagtatatacgtggagtaaggtttataaatacagtaaatcaataaatagagttattctaaaataagaaaaatgacaaatcttatttagaaatagctctattttttgtaattaaatttaaattatattcaatttgtaaaatattattttgaacaattatacatatactctctagttagaggtaaatcattttttatacctttagtgaaaagtatttgatgtatatctataataccagtgttgaaagcagcagcacaagaacaaaggtataaatcccacattcttataaacttatcatcaaacatttctttaatctttggaagattctcagagaaacttttttgccagtatagtaaggtttttacataatgtaatcttaaactttctacgtctatagtatgatatttgtaatcactacaaatatgtatcatttctcttaggctaggaataactcctcctgggaaaatatatttttttatccaagggtctccataagattcctgcaatccacttatatagtgaagtaaaaacaatccaccatcttttaaaacagcatttacgtttttaatgaaaagttcatagttttctctaccaacatgttcaagcattccaacgcttacaactctatcaaacataaggtctgatttttttaattctctatagtccataagtcttacctcaagatagtcttgaaggttctcttctttaattcttgcgttaaattccttaaattgctcttcgctaagtgtaattccaacgccgtgaattttatatttttttgcagcttctattagtaaaaatccccaaccacaaccaatatcgagaaggctcataccttcctctaaatttagtttagttaatatgtggtgaactttattgacttgagcatcataaagagtatcattatcatttctaaagtatgcacaagaataactaagtgtcttatctaaccataagctataaaaatcgttgccaatgtcatagtgggcatgtatttctttcttctgatgtctcattgaatttgatgagtgcaatagatgttttacagctgaattatcaatattgaatttgtctatttgttttaaaagtagatttaaagttaagaataaatctccctcaacttcaatgtctctatttatgtaggcttctccaagtgctaaagatgtactttttaatagttcagacttgctaatatcattatttactataactttgaactgaggggagccctctccaattagaaattcttcctcatctttaagcctaactagaaatggtgtttcaccaaatttctctaaatagtcttttaaaaaattttttgtaatattcatattaccagctccttctaatgtaaatccagtaagtttccctgcttaaaatatattatagtcctttttttaaaaaagtaaaattttttcaataaattttttatttaaaggaaatttattttttataaagaaatttcatgttgtagtatattttttgcttataaattttggtactggatataatattaaactgttaatgatataataaatttaatctataaagtaaataaaattttgtaataaatagttaaagctattttataaggagatatatgatggaagtatatgctttggttgggtcaagtggcacagggaagagctttaaggctttagagttcgcatatgaaaatgatatagaatatataatcgatgatgggattttaatatacaaaaacaaggttttagctgggatatcggcaaaacaagcaaatactactatagaagcagttaaaagggctattttttataatctggagcatagacaagaagttagagaagcaattaaaaaagaaaatataagaaaaattcttattattgggacatcaaaaaaaatggttaatcaaattgtagagagattgtcaattggaagggtctgtaagtttataaatatacaagatataagtactaaatatgaaatagaaatagcaaaacaagctagaaaagaaggaaatcatgtaattcctgttccagccgttgagataaaaagtatggcaagtggtctcagtataaattctttgaagagactttttagaaaaggaaataataggaatatggtagttttagaaaaaacaattataagaccaacttttagttatataggaaagttttatattagtgctgatgtaattaaacagattattgaatatgaagtatacaactttggaagcattgatagaataaataaaatcaatatagagaattgcaataattttatgaatatttttgtaagtataaatatcaatgatttagaaactataaaaaaaattgaagacatacaacagacaataaaaaagtctattgagaaaatgactttagttaatgtacaaaaaatagatattaacattcataaaattaaaaaaataaacttcctccaatgttaaaaaataaactgagaaaatgatatactaatttgcaataaagtgtgctataattaaactgtaaatttaggaaatggttttttctaaatggagtatacataattataacgtatttataagggggctttcaaatgtcaggaaaagatgtaaatgtcttcgagatggcgcaatctcaagtaaaaaatgcatgtgataaattaggtatggaaccagcagtttatgaattattaaaagaacctatgagagttatagaggtttcaattccagtaaaaatggatgatggttctataaaaacttttaaaggatttagatcacaacataatgatgcagtagggccaacaaaaggtggaataagattccatcaaaatgtttcaagagacgaagtaaaagctttatctatatggatgactttcaagtgttctgtaacaggtataccatatggtggaggtaaaggtggaataatagtagatccatcaactttatctcaaggtgaattagaaagattaagtagaggatacatagatggaatatataaattaataggtgaaaaagttgacgttcctgcaccagacgtaaatactaatggtcaaataatgtcttggatggttgatgagtacaataaattaactggacaaagttctataggtgttataactggtaagccagttgaatttggtggttctttaggaagaacagctgctactggatttggtgttgctgttactgcaagagaagctgctgctaaattaggaatagacatgaaaaaagctaaaatagctgttcaaggtataggaaacgttggttcttatacagttcttaactgtgaaaaacttggtggtactgttgtagctatggctgaatggtgtaaatcagaaggttcttatgctatatacaatgaaaatggtttagatggtcaagctatgttagattatatgaaagaacatggtaacttattaaacttcccaggagctaagagaatatctttagaagagttctgggcttcagatgttgatatagtaataccagctgcattagaaaactctataactaaagaagttgctgaatctataaaagctaaattagtttgtgaggctgctaatggaccaactactccagaggctgacgaagtatttgctgaaagaggaatagttcttactccagatatattaactaatgctggtggagttacagtttcttacttcgagtgggtacaaaacttatatggatactactggtcagaagaagaagtagagcaaaaagaagaaatagctatggttaaagcatttgaatctatttggaaaatcaaagaagagtacaatgttacaatgagagaagctgcttacatgcattcaattaagaaagttgctgaagctatgaaattaagaggatggtactaagatttactcttaataaataataggatataattatttaagatataaaggggctgtacatagtacagcccttaaattatgtggcttacaatgaagtaagctatttttgttttaacttataaataacttgataaattatgtaatttagaatgcataaataagatgggtgaaaattaatggttgatttaattttgaatgtattttttaccaccacatgattacaaattagaggagttagattggatttttggacatgaacttatgtattttaaaagcaaagaccttcatttaaagtatctagtattatttttaaaaatagtatattggtttaatccatttatatatataatggaaaaatatatggatttggattgtgaactttattgtgatgagagagttttaaaaaattgtactgtacaacaaaagcaagaatatgctctaactattgtaaattcaatgaaaagaggtataaatttttcaaataaatttgtaactggattaaataaacaatctgatattagaaaaagagtaatgaacatgttcagtgaaaaacataaaaatggtatcttaatggctttgattataagcttgttttcttctattacattttttaaattcgattcaactagtcttattgaagagaatgatttcttagagaggtcaagatatgcgtttgaaggaaggcaagaagacatgtttgtaacaatagattctacatatgcagatgcacctataaaacttagaaaagagcatgaagaaaactgtagagtcaatggaatagtaccaaaagattcagattcaatagaaattattcctagattttataaagattgtatggatttaaaaaaataagttagacttaatattgatgttgatattatgaattttttatatttaagcaattgaaaattttattatagattcaattttatatgtgtttaagtatgaaatttatagatagttgaaataattaaatatgattgatgcataggaatcattactaagctataattaattataggggagtttaaataaattatgagttacacaattataaaatgataaaaaatagttatctgttacaaaaaatgtatctttttaattaataaagataatatgaaaacttaaaaggcaaataaacttaaacataaaatactcttaaataagataggagaaaaatgtatgtctaactttattctaaatgggatttttagaacagttatagtaagtagtctaagcattcttctgatattgattttcaagaaaaatgtatttaaaagatttagcaaaaaatttaattattatatatggatgatagttgttattaaattatttttaccatttacatattatacttttacaataaatatcttgagaagtaaaaaacacattaatattaataacataaatttagagggatttaataatgtttcaactataagtaataatattatattgtacacttggattataactgtagtagtgtatttaatttacactatatttaaatatataaaacttaaaaatttaataaatgacttatcttatgatgttgatgatagagagattgtaaatctttataaaaatatattagaagaatttaatataacaaaagatataaaactcaaatactcttatgaagttgaaacaccagcattttttaattcatgtgtacttttgccaccacatgagtataaattgaaagagttagactggatttttagacatgagcttatgcattttaagagtagggacctttatttaaaatatgtaatcctgtttttaaaaacagtatattggtttaatccatttatatatataatggataaacatatagatttagattgtgaactttattgtgatgaaagagttttaaaaaatcgaaattcagaggaaaaaaaggattatgctttaacaattctaaatgcaatgagaaaaggttcaaatacttcaaataaatttatagctggactccataagcaatctgatattaaaaagagagttatgaatatgtttaatgaaaagtacaagaatggtatattaatggcattaactttatgtttattatcttctattacttttttgaaggttaattcaacgagtattgttaatcttaatgtattacctaaaggatttgaagacttacgaactgttagcagtatacgtttttcagttataggatttacatatgcagatgctcctaaaaatatgagggaagaatataaaataaattgtgaatcattaggtttgatacctaaagactctgataaaatagaagttggtgtagaatattatgacagtctattgaatgattaaataaatattattttaacagatattaattataaagttttgaatagtaatttgttgagaaataaatatatccttataaaaatagatacttatataccaagaataaaaaatagttaagatagtacacaaggatatacttataaagaacttaaataagtgaaataaattattaattataaggtttataattttaaaaaattagataaattcaggtgtaaaatactataaaacacaattcggaaaagtgtatgttgaacttcatttaaaatagaattttcaaagttgttatagtaagtagtttaagcattcttcttatattaatctttgagaataatgtacttaaaaaagttagtaaaaaatttaactattgtatattaatgatagttgctattgatatattatctaaaaaaattaagtatgaaaagattactgctaggacaatcttttcatacttaattttttaatatttatattctccaaaattttcatctttttaacttagaattattagaatttgagaatcactattaggaaataggttttgatttatgcagggttaaaaatttcacagaatatctaactttatactaaatccatcaaaaaatatacgccatataaaagcgcataaaaaaacacataaaacaatatttatgcgcactttaacctcgaatggtacaaaattctttacttttacagacccatattatataattaagtaaataatgtatatttaggtgacatattggataagctaatttatttattttattaatataatgatactataaaagttatataaagtggtttacaaaaaagttacagatagagcttttattaatgtattgtgtattagtattttatccttaggtacacttcacctacaaaatagaatcataagataattatgggaaaattttaggaggtttatcgtgaagaaaaagatattaataccagtatttgcatcagttatggcattatcagtaagttcaattgtaaatgcagatgaagtaaatgattcatctcaaaataaggatgataaaacaaatactgaattaaatttaggtgaatataaagaagtaaaatataaagttgcaaaaataaaagatggagtagctataaagataagagaagaaggtcaagttcaaaacatagcttattctggagatgaatttacggttttaggaactcaaggagaatgggttaaggttaaagttgaagatggcgaaggttggttagctactagatatgtagatatatctgaaggtgtaggatatactaacgctgataaagtaaacttaagaaaagataagagtgaaagttcagaagtaattgaagagctggaaaaaggaagttctttattggttttggaggataatggagattggttaaaagttaaagatggggaaacagaaggatatgtaaaatcatcttatatatctgataaagctcctgtaatagaagagccacaagtaaacccaagtattgaccaaaatgtagattctacaaataataatcaacaaaacaatgcaaatactaatcaacaaaataataattcaaatgtgccaacagctaactctaatgcagttcaagctgtacttaacttggcatattctaagcaaggttgtccatatgtttggggagcagaaggaccaaacacttttgactgttctggatttacacaatatgtgtatagaaatgcagtaggaaagaatataccaagaacatctaaagcacaatctaaatatggacaaactgtaagtaaagcaaatttacaaccaggagacttagtattcttcacaactaatggttctggttctgttagtcatgttggaatatatgtaggtgggggtaatatgatacattcaccatcaacaggaaaaacagttagtgtaactagtataaattcatcatactatacagcaagatttgttacagcaaaaagaatattataatcggtttgtaatatgacaaattgataaatacataaatatatataaacgctctatattatatttaatttaatcatggaaacaaaaaatgattatattttaaatgtactatagagcgtttttgtatcactttaaatctaatcaagattcaagttaatatgactattaaataggagccttttcatatgatgattatttgcgcaatcccttgacaggatagggtaaaggtggtaagctactaacagtacaaaaatacttttaattttagttcagagaggctaaaaaaggaggacgaaagatgttaaaatcaagaaatttaatccaaccagaagacttttcaatagaagaaatagatgaaatattagaattagctcaaaaaataattgacaatccgtcaaaatattctcgtatatgtgaaggaaaactattagctacattattttatgaaccatcaacaagaacaagattaagctttgaatctgctatgaacagattaggaggacgtgtagtaggcttttcagagccaaattcatcctctgcatcaaaaggtgaaactctaggagatacaatgaggatagtatctggttatgttgatataatagctatgagacatcctcaatcaggtgcagcttcagaagcagctagatatacggaagtgccatttataaatgcaggagacggcaaaaaccagcatccaactcaaacacttacagacttacttactataaaatcattaaaaggaactttagaaagccatacaataggattatgtggtgatttaaaatatggaagaactgtgcattctttggttaaggctatggcaagatataaaaatacaaagtttgtatttatagcgcctgaagagttaaaaatgccagattatataaaagaagctataaagggacatgcatattatgaaactaataatttggatgatgttataggaagcttggatgttttatatatgactagagttcaacaagaaaggtttgaagataaatcagagtatgaaagacttaaaaactattatattttaaataaagctaaattagaaaaggcatctaaagatatgttagtaatgcatccattaccaagagtaaatgaaatagacatagatgtagatagtgatgatagagctgtatattttaaacaagctaaatatggaatgtatgttagaatggctttaataataaaacttttaggtataaatgaagactaatagttatcatataatagtaaaacaaaggagattttgggatgtataaaattctggaaaatatatatataggcgaagatatgtatagaatgaaagtaaaaggtaattttgaaggtaaaatgggacaattctatatgttaagagcatgggatacttatccagtactttcaagacctataagtatacatgatatagatgaagaagggataacttttctttataaagtagtaggagaaggaactcaaattttgagtaacctaaaggtaaatgataatataaaattagaaggcccttatggtaatggatatgctaaggttgatggaaaggtagctctagtaggaggaggaatcggtgtagctccactatatttggttgctaaaaatataaaaaattgtgatgcatatcttgggtttagagaagatgttatattagaagatgaatataagcaagtatgtaataaagtctatacaacagtaggaaatacttttgtaacagatataattgatgttgagaaatatgattatatattaacatgtggtccaactccaatgatggaaaaattagttaagatggtagaaggtactaaaacgagaattatggtatctcttgaaaaccatatggcttgtggagtaggtgcctgtttagtatgtacgtgtaaaactaatggaggaaacaaaaagacttgtaaagatggtccagtgttctggggagaggacgtgatttttaatgggtaatttaagtgtgaaatttggaagtgtagaatttaaaaatccagtaataatggcgtctggaacttttggatttggaaaagaatataatgagatttatgatatacaaaaacttggtggtataagtagcaagggtcttactttaaataaaaaacctggtaacaatggtatgagagttcatgagacaccatccggtatgatgaatagtgttgggcttgaaaaccctggagttcaaggatttatagactatgaattacctttttttagtaaactagacttagtcagaatagctaatgttggaggtgggacattagaagactacttattaggggttcaaatgttaaatgacaagcctatagacattattgaattaaatatatcttgcccaaatgtcaaagctggtggaatggcttttggtataaaaaatgaagtggcaagagaagttgttcgtgaggtaagaaacataacgaaactgcctttagtaataaaattatcacccaatgcagaagatattgtaggaatggcaaaagtttgtgaagaagaaggtgctgatggagtttcattagttaatacttttaaagcaatggcaattgatataaaaaatagaagaccagtatttgaaaatgtatatgctggattatctggaccagctataaaacctatagctttgagaatggtacatgaagtgtgtaaaaatgtaaatatacctgtaatgggaatgggcggaataactaaagccacagatgctatagagtttataatggcaggagctacttgtatccaagttggaactgcaaattttatgaatcctagaataggtattgaaataatagatgggattaatgaatttatggatagagaaggaataaaaagtttagacgaaataagaggaattatataaggtagaataaatagtattttaaagataaaaaatatagattaaataaacaataattttataacattaacatggaggaaaaataatatgagtaaagtagatgtagtggatatattaaagaaaagtgatgcattgttggagggacattttttattatcttcaggaaaacacagtaatagatacgtacaatgtgcaaaagtattaagatttccagaatatgctgctgaggtattaagtacagttgttgaacaaataaaagacttagatatagacttagtagtaggaccagctatgggtggagtaatagtttcttatgagttaggaagacaattaggaaaagaagctgtatttactgagagaaaagacaatacaatggagttaagaagaggatttgaagttaaaaaaggagcaaagataataattgctgaagacgttgtaactactggtaaatcaactatggagacaaaaagagtattagaagccttaggtggagaagttgtaggtgttgcatgtatagcagatagaactaatcatgatataggtatgcctatatatagtgctataaaacttgatattcaagtttatgaatctgatgagtgtcctttatgtaaggaaggaaaattaccagttgttaagcctggaagtagagagttcaaggaattagggatgtaataaaaacttaattatttatagtgttacttaaaaaatgtaaattttttagagtaaaaatttgtaatataacatataacttaaaaataaaaagcagttagccttataaatgaaggttagctgttttttttgttaaaaatatatttacaaaataagagatagtagcagtacaatataagtataaggtaaaagtattatatattagggaggggtaagtatgaaaaatcaattaaatgaaaatcataaaaaggttgtattttttggagtaggtgctgtaggagctacttttgcagaacaattttttaactctaaatatgattttaaaattctttgtgataatgaaagaaagaaaagatatttagaagaaggatttataataaatggaaaaaggtatgattttaattatgtaactaaagatgagtataaacaagaggctgattttataattataggtctaaaatataataatttaaaagaaaatataaaagaattagatggattagttggaaaaaatacagttataatgtctctgctaaatggagttgatagcgaagagataataggagaaagatttggaattggaaaaatggtatattcatatgttaccaatatagatgcaaagaaaatcaataataatattatacacactactaatgggataattgtatttggtaacaaagataatagtgaagatagaaaaactaatataataactgaagtctttgatgatgtaaatatagaatatattttatcaaaagatattcaacgagatatgtggtggaagtacatggttaatattggtgtaaatcaaacttcagctatacttggtgcaccttatggagtttttcagagttctgagcatttaagagaattagcaaaatctgcaatgagggaagttgttgctatagcacaagcaaaagacatatctcttacagaagatgatgttgaaaattcattacatagaatactagaacattcaaaagaaggaagaacatcaatgcttcaagacgtggaagctcatagacctacagaagtagatatgttttctaagaatatctgcaaacttggaaaaaaatatagcatacctactcctataaatcagactttattttatatgataaaagtaattgaaagtagattttaaagggtatttgtaagaaatattgataattattgattttaaattttattaatgttatatactatttaagttactaaatatttttaactcttcaatgaaaatagttgctgcttttgacaaagttatatcttttggaaatatatatgagaaatgtctgttgtagctgcttccaagctctatgacagacagctcattgtttaaaacaggtaagcttgtcactagattagaaactattgtaattcctaaattatttctaacagattctttgacagcataattacttccaaaaaccatcatactttttggaataatttctttaacacttaaaaacatatctaaatagtctctggttccagaaccatcctccctgactatccatttttggtcttgaagtttatcaaaactaaaatcttttaataaatgactattgtatggaagtgctaaaaccatcttatcttcaaaaaaatattcttgaataaatgaaggggaagagcaagtgccttcaataagaccaatgtctaaaatataatccttaacatgagaagatacgattgatgtattttttataaaaacttctacatatatgtcaggatacttttgagaaaataatgctaaaaaatttggtagaatatattctccaatagttaaacttgcaccaatctttaagtgaccagttatagcatctgaaacttggcttacatcatgataagtaatatttaaaagatttaatatttctttagctcttttgtacaatatttgtccactttctgttataaaaatggttttttgtttaatagacctgtttataagcacaactttaaaataattctctagattttttatgtgtttacttacacttggttgtgatagatttaagtattccccagctttagtaaagtttttgtattcaacaacagctacaaatgtttttaattcttcaaacaattttttgtctccttcacctaatgaaattttacattttttatatactttctacagataattatactatatataataaccattaaaaacattaatcattacgatattatatatttattttacttatggttattacaattatatactattgctatgaagaaaactatattaattataaggtaggtatattatgttaaagaaaaaaagcagtttgacattaaaaactataagggaaatattaccaggactgtttatatcagtgttagtaggttatattagtatatttatttctattttaattcctaaggtaggggcagcatcaatttctatatttttaggtatgtttgtaggaaacctatttttaaatcaaaaggtatttcaaaaaggttataaattttcagagacagatttgttatcatattcaatagtactattaggggcaacactcagtgtatctaccttaatagacttaaaagtttcaggaattttatttataatattgcaaatgacaataacaataatagctgcactttatataggtaaaaaactaggatttgaagaaaactttagatttctaatggcaagtggaaatgcagtatgtggttcttctgccataggagcaatagttccagtggttaatgcgacagataaagaaaagggaattgcagtaactattgtaaatgttactggtatattccttatgtttttacttccaataatatctcaatttttatatagccatgaacttgtaaaaacttcagcaatgataggtggaactttgcaatcaattggtcaggttgtagcaagtggagcaattgttggagaaaatgtaaaagatttggctactatttttaagatagtaagagtaatatttctagttgttgttgtattagtatttggacatatgaaaaatcagtctaatagggaaatccttgaagaagaaaaggatgagataaaaaagaaaaaagtaactataccatggtatgtaattggattctttataacttgtgcacttttttcaatgaacattataccaaaagaagtatctgtgttgtgcaaagaaataagtaacaaactagaaataatagctttagcagcaattggattaaaagttaatgtaaaagatttagtgaaacaagggaaagaagtttctttatatggtttatttgtaggtacagtacaagttgtatcagctgtagttttaataaaaatatttatatagcacaaaaatagtatttgtaatattaatttgattaattaaaataatatgatactaataatttataatataaataaaaaatgaatttcgataagtttaagtgggtataaacttatagaaattcattttttatttaaggtaaaaatttaaagtaaaatattattttacataataataaccttataaattttgaaattacttatctttgtgttaaaataagtaaaatacacatattaaagttaagtttttaggcaaataaacaaaatgaaaatataaatattaaggagatttggtatatgaatgtttatgaaaaaggtaatggagttatactagaaggagtaacagattttgacccagtacatatatttgagtgtggtcaatgttttagatggcacaaacaagaagatggctcatacactggagttgcaagggggagaatattaaatgtcaaaaaagagaatgataaaatatatttaaataatacgaatttaaaggagtttaacagcatttggtataattactttgatttaggaactgattatacagaaataaagaataagctaaaaaatatggatgaatatttgaataaggctactgaatttggatggggaataagaatattaagacaagatggatgggaaatgcttatatcatttataatttcctctaataatagaattcctatgatacaaagagcgatagaaaatttatcaagaaagtttggtaagtatataggtgaatatgaaggtaatgaatactatgcattcccaacaccagaagaactaaataaggcctcacaagaggaaataagagcatgtcaaacaggttttagagataagtacataaaaagtactacacaggcagttatagagaataatgatgaggtatctgaatatacaaatttaagtacagaggattgtagaaaagagcttttaaaatttaatggagtaggaccaaaagtatgtgattgtattgcattatttggtatgcaaaaatatgattcttttccagttgatgtttgggttaagagagttatgcaagaattttatatagatgaagacatgagtttacctaaaatgagaacttatggaatcgataaatttaaagaaatgtctggatttgctcaacagtacttattttactatgcaagagaactcggtataggaaaataaattaagggggagaaattatgggagtaataggaacaatatttctgttctatttaattatatcatatctagctggagccataatttctgtgattatattgcttgaaaatagagaccctgcaaaaacaatgtcttggctattgatgtttattatatttccaggtgtaggtttaatgatatatgctatttcaggtagaaatattagaaaaagaaaattatttaagactcaaaaactagctaataatataaaagaaaagaaactatttgatacattagaaaagataacagaaatagttgaattagaaaaagaatctataaaacaaaataagcttttaagagatgaagaggatggtagttatagaaaaagggtaataaatatgttgttaaagactggtatgtttccctttactaaaaataataaagtggatgtatttgtagatggaaatgaaaagtttaaaagacttatagaagatataagagaagctaaagaccatattcatttagagtactttatcatcaaagatagtgaaataggtagggtgttaaaagaagaacttataaaaaaggctaaagaaggcattaagataagaattttatatgatgatgtaggatgctggagattttggtttaatagaaaatttttccgagaaatgagggaagtaggtatagaaattgcagcatttttacctacaaaatttcctataataggagggaaattaaactatagaaatcacagaaaaattgttgttattgatggaataattggatatacaggtggaataaatataggagatgaatatttaggcaaaaatgataagtttggatattggagagatactcatattaggattaagggtatttctgtatacatgcttcaaatgacatttctgattgattggtattatacgacaaaagaagtattagtgactaaaaattatttcccaagtgtagggaatgttggtgaaagtatgatacaagttgttgcgagtggtccagacagtgactgggaagatattcattatgcttatttttctgcaatatgtcaggctagaaaaaatgtttatatagaaactccatattttattccagatgaaagtctactaaaagctataaagagtgctgctcttagtggagttgatgtgagaataatatttcctaaaattgcagaccacaagatagtaaatatagcatcttattcatattttgaagaaatattaagagcaggtggtaaagtttatttatataataaaggatttatacattctaaagtcgtaataatagatgataaaattgcttctgcaggtacagctaatatggatttaagaagttttatgcttaactttgaggtaaatgcatttatctatgatgaagaagttattagggtaatgacagatgatttctttgaggatttaagtcactgtgaagaacttaatttggaggtatttaagaatagaaatatcatacaaaaaatcaaagaatctgtagcaagattattttcaccaatattataaaaaattattaaaaaaggtattgaaaattatgtgtgattggtatattataataattgttagcactctattagatagagtgataataaataaaaagtatatatataaatctacatatataagtagtattaatttaaaaataactaaaaacataggcgaactagtctatacttaatattttaggaggcgtgaataatgaaaataagaccattagctgacagagtagtaattaaaaaagtagaagcagaagaaaaaactgcaagtggaatagttttaccaggagcagctaaagagcaacctcaaatagctgaagttgtagaagttggaccaggtggaatagttgaagggaaagaaataaaaatggaattgacagtgggagataaggttatattccaaaaatattctggaacagaagttaagatagaaggacaagaatacacaatactaagacagagtgatgtattagctgttattgaataaatatagaataaatttattaggagggatttaaaatggctaaagaaattaaattttcagaggaaacaagaagagctttagaagctggtgtaaataaattagcagatacagtaaaagtaacattaggacctaaaggaagaaatgttatattagataaaaaatttggttctccacttataactaatgatggagtaactatagcaaaagagatagaactagaagatagatttgaaaatatgggtgctcaattagttaaagaagtagcaactaaaactaatgatgtagctggagatggtactacaactgctacagttttagcacaagctataataagagaaggtttaaagaatgtaacagcaggggctaacccaatacttttaagaaaaggaatacaaaaagcagtaatagtagcggtagaagaattaaaaaatcaatcaagaatagtagaaacacaagaggctatatctcaagttgcttctatatctgctggtgatgaagaagttggaaaattaatagcagaagctatggaaatagtaggtaaagatggagttataactgttgaagagtctcaaactatgaatactgaattagatgctgttgaaggtatgcagtttgatagaggatttgtttctgcatatatggttacagatgtagataaaatggaagcagttttaaatgacccatatatattaattactgataagaaaatatctaacatacaagaattattaccagttcttgaacaaatagttcaacaaggtaaaaagttattgataatagctgaagatgtagaaggtgaagcattatctacattagtagtaaataaattaagaggaacatttgatgtagtagcagttaaagctccaggctttggagatagaagaaaagaaatgcttcaagatatagcaatacttacaggtgctcaagtaatatcagaagaattaggttatgatttaaaagaagctgatttatctatgctaggtagagcttcatctgttaaggtaactaaagaaagtactacaatagtagatggttctggagataaaaaagctatagaagatagagtaactcaaattaaacatcaagtagagcaaactacttcagattttgatagagagaaattaatggaaagattagctaaacttgctggaggagtagctgttgtaaaagttggagctgctacagaagtagagttaaaagaaagaaaattaagaatagaagatgctcttaatgcaactagagcagctgtagaagaaggaatagtagctggtggaggaactgcttttgttagtgttataccagcaataggaacactaattgagagtttagaaggagaagttaaactaggtgctcaaatagttaaaaaagcgttagaagagccattaagacaaatagctataaatgctggtcttgaaggtgctgtaattgtgcaaaatgttgttaattctgaagcagaaactggatttgacgcattgaatgaaaaatatgtaaatatgatagaagctggtatagttgacccaactaaagttagtagaagtgctttacaaaatgctgcatcaatagcaagtactttcttaactactgaagctgctgttgctgaccttcctgaaaaagaagatgcaggaatgccaggaatgggtggcggaatgcctggtatgatgtaatttaaaaaatttaaaatataaattttaatataaagaactatttcgacttagattttaaactctaagttgaaatagttcttttgtatatatctaatttttgtatatctataaattcaatacacatatttagataatcagtatctagtttgtaataatattttagagtagtattgttattttttaggttatgattttagatatatattaattaaggtataattgttgatagagaataaatcaaatttaaaaggatgcgataatatggacttaagaaaattacttgaagaagttaaaaatgaaaatattgatatagattttgcgttagaaaagttaaaagatttaccttatgaagaccttggatatgcaaatatagaccatcatagagaattaagaaatgggtatccggaagttatttattgtgaaggtaagagtgatgagcatattttagggattattgataaaatgaatcaaaaaagttctaacatattggggacaaggtgcagaaaagaaacttttctgaaaattaaagaaatctataatcatgctgagtacgaagaggcgtctaaaattcttaagattcaaaatcatgatatagagaatataggaaaaggtaaaattgtgattgctacagggggaacttctgatataccagtagcagacgaagcttatcatacagctaagtttttaggtaatgatgttgatagaatatatgatgttggagtggcaggtatacataggcttttaaataaaagacataaaatagatagtgctagagtaatagtagccgttgcaggtatggaaggtgctcttgcaagtgtaattggtggactggttgatgttccagtaatagctgttccaacttctgttggatatggagcaaattttggaggattagcagcattactagctatgttaaatagctgtgcatctggaatatctgttgtaaatattgataatggatttggagcaggatatttagcatcaatgataaataaactgtaaatacattgatataaattaaacaaaactatataataaaatttaatttctattatatttttactattaaaattgaggagacatatatgagtgaaaaaatactttattttgatataataagcggtatatcaggggatatgacccttgcaagtttattaaatttaggtgtgcctaaggaaatttttttggaggaaattcataaactaagaatgagcgatgaatttaatataaacatcagctcgaaaactgaaaatggaatagtaggtacaaaagtagaagtaattacaaaagaaaaacatacacatagaaatttagtggatatatttgaggttatagataaaagcactctaaacgaaaatgtaaaatctaaagcaaaaaaaatatttatggtaattggagaagcagaagcaaaagttcatggaactacaatagacaagatacattttcatgaggtaggggctatagattcaattgtagatatagtaggagcttctatattagttgacttactttgtgtagataaagtttgtgctagtacagtgtctgttggttcaggatttgtaaaatgtgaacatggaattatacctatacctgcacctgcaactatagaaattttaaaaggtgtgccaattaaattaaataatgtaaatggagaatgtacaactccaacaggagctgcaatcataaaagtcttgtgtgatgagtttgtagatgagcttgaattttctccaaagcaaattggatatggtataggtcataagaagtttgaagtaccaaatatactcagaactgtattaggtgaaaaaaaaaagaagaattaatttatgaaattagtgcaaacattgatgatatgtcttcagaaatctattcttatttgtatgaaaaaatattagatgagaaagcattggatatttatacagagagtatttatatgaagaagaatagaccagcaacaaaagtatcaattttatgtaatgaatcagatttagaaaagtttattaaaatattacttttagaaactagtacttttggagtgagatataatgcatataatagagaaattttagagagaaaatttgtaaaattagatacaaaatatggagtggttacagtaaaactagggtattataaaggaaaactagtcaaggttactccagaatataatgaatgtaaaactatagcaaaaaatgaagatattcctataaaaaaagtgtttgctgatataaattttagaataaaagaagaatttagtgaaaacttattgacataagtaataaattttgataaattaatattcagccttattaaataaaagtaaacagaaaaaaatatataaaatataaactcactcgtatatgctcagaaatatggtctgagagtctctaccaagataccgtaaatatcttgactatgagtgaaattattataccaaaagacctagttaagtaaatgtgtaggctgagttatactccctatgtgttggctataagataaaggtattttggaagcctgtatagtaatttcacttttgctagaaattatggaagttactatacaggttttttgtgtaaaaagatttaatataatttagactgtattgtgttaaaataaatatataaaaactatattatacaaggagagatgtgaatttatgaaacatgaattagtacttgtaatagattttggaggacaatataatcagttgatagctagaagagttagagaaaacaacgtatattgtgaaatacttccatgtactgcaagcatagaaagaataaaagaaaaaaatcctaaagggataatatttacaggcggtccaaatagtgcgtatttagaagattctccaacaatatcaaaagaaatatttgaactaggagtaccaatacttggaatatgctatggtattcaaataatgtctcatgtattgggtggagttgtaagaaaaggtaataaacaagaaaaggaatatggaaaaacatctataacttatggaaaatcatcattatttgaaggaataactacaaatagtgtatggatgagtcatacagatttaatagaaaaagttccagaaggatttactatagttgcaaatactaatgattgtccagtagcagctatggaaaatgtagaacgaaacctatatggagttcaattccatccagaggtagaacactgtttggaaggggacaagatacttacaaacttcttatataatatttgtaaagtaaaaggtgactggactacagattcattcatagaagataaaataaaagaattaaaagaaaaaataggcgataaaaaagctttatgtgctttaagtggaggagttgattcttctgttgctgcagttcttattcataaagcaattggggacaacttaacttgtatatttgttgaccatggtttacttagaaaaaatgaaggaaatgatgtagaaagaatatttagagagaaatttgatataaatttaataagagttaatgcagaagatagattcttatctaaattaaaaggagtttccgaaccagaagctaagagaaaaataataggtgaagaatttataagagtatttgaagaagaatcaaataaattaggaaaaatggatttcttagtacaaggaacaatctatccagatgttatagaaagtggacatggaaatgctgctactataaagtctcatcataatgttggtggaatcccagaagatgtagacttccaagaaattgtagaaccattaagagagttatttaaggatgaagttagaaaaataggattagagcttggtatagaagaaggattaatatttagacatcctttcccaggaccaggtctaggaataagagttataggtgatgtaactaaagaaaaatgtgatatattaagagaagctgatgctgtttatatggacgagcttagaaaagcaggtttatacagagaaatatggcaagcttttgcaacattaccagatgttaagactgttggagtcatgggtgatgaaagaacatatgcttatttagttggtttaagagcagttacttcttctgatggaatgacttctgactggtataagatgccttatgatgtattagaaagaatttctaatagaataataaatgaagttgatggagtaaatagagtagtttatgatataacttctaaacctcctggaactattgaatgggaataaaatatagaatgccagaaatccacatgaatacaggatttgaggtctctcttacttctatattatactggtttgatactatcaatatttgccagtatcttatggattaataagcaaaaaacatcctgctgaatggtaaattcggcggggtgtttttattttgttttgaaactcctttgctctgaaactcgaagtatttaacactgatgatgttgttatcttttagttccttttgtgtcatgctctgaaagacaaattgatacaataaaaaagtaatttcttaatcattgatggagatatgtatttatgttactcttgatggtaatttgagtaatattgttcatagctttttatattcacttaattagaaaaccatttggtataatcataaataaacttgatgatataatagaaaagatttataattattagaagtatataaaagtattttatgtctatgaaatgtatgtctataaaacatatagatgacttttgtatattaatgtatgaatattgatattatagaagaattgagttgtcaatgatactaaatcaaatatttatagaagatggagggattatgagaaataaaataattataggaattactttttcacttgtattactaatgtctggatgtgcttcaaaacaaacagcagaaataaacgtattagcaactactgatttacatggagttataccttatgagttaacttcttatgtaaaagaagaaagaaaaaaagataaaaatctaactttagtagatgcaggagatttttttgatagtggagaagtgtttggttctagcatggatagttattttagtgctagatataaagatggtgataataacactgaaagttatattgagacgcctatttcaaaagatatgaaagaggtaggttatgatgttgcagttcttgggaatcatgaatttatatccaacaataaattttatctagataatatgatatctgattttgagaaacaaaaaataaatattttatcggcaaatacgtataaaaaaaatggagatagttatacaaaaccatacataataaaaaatattaatacacctgaaggaaacgtaaaactaggaattttagggcttactataaaagaagttggtgagaggaaacagtggaaagatggaaaacttgttgactctaagtctttagaactaaaagaccaagagggctacaatggtgaattgtatatgaatgatttagtagaagatgctaaaaagtgggttggtataatggaaaaagagaagcctgacattatagttgctgtggcacatacaggtgagaaacctaagaaacctagaaacccaggaaatagaatacaagacttagctcaacaagttgatggaattgatgctatagttgcaggtcataatcatgttcaaattgagcaacatgattataaaaataaatcaggagaaaatgttatagttactgagccaggaaagcatggggaatatatttctaagattaattttaaattagaaaaaaacaatgataaatggaatatagttgacaaatctagtaaattaattaaatttgaaaaaaatcaagaaagtgataaatttggagaatttatttcttcaattaataaagtaagtaaagataagaaagaaataagattatcagaagtaaagactcctgaatgggataaaatatatgtttttaaatctggaacatctgcagatgatatatataaaacaataggatataaatggagaaatatatcatctccaaagggtgatgacatggtgcagattgttgtaatgaataataataagcctgttagctatatatatggtgaagctgaagttatgccaattaatataaaatgtgatgaatcagagtataaaaataatgttgtaactatttatcctaataaaaatgataaatttaaaattgaaaaaggtaagcaagaatatagtattaatttaaaacatatacaatagaaacttttatcttatttaagtttagattgtacttaaaataaagtgtgtattattttaaaaagtgatgataattaaaatcacaacattaaggaatagtacacactttttatgctaaaaaatagaatgttaaaaaattaaacctttaaattaaagtacattgcttatattatccaatattatttccaaaggttgtgtaatatttttatccttatgtaatattgctaacattttattttccatatctatctcatctaattcaatcaatcgcaattttttatgtaagagtgaatctaataataaattttctggcaaaatggttatacctaaccctgcttctgcagctttaataagtgcaaaagaattaacactttcccaaacaggataagctttttggtttgaaagagataatacactgtccaaagtatcgcgaatagcacttccttgttcacgtaacaataacggaaacgtgcataactgtcgtagagataaggtttgttcagataaaggaaaagttggagcacatgcaacacataacttataggaacctaataaaattgtacggaatgccccctgtggttctataccttcccaaaaacatatatcagcttctccactttttaaaatatccatagctgaattagcactttcgacacgtacattcactttaagagatggaaatgaattttttagtcgacttaaaattggtggaagtaaaaaagaggcaattgtaatgctagaaacaatgtttataggtgtacattcttctaaacgactgatttttttgtctaaattgcgacaagcagttaagatactacgtgcttcatctaaaagagaaatgccacagcgagtaagacatacccctcgtggtaatctgtcaaatagtgatgtttcagcttgttgttcaagttcagctatagcatgagatacagcagattgtgtgatatgtaatttttttgcagcacctgtaaaagtgcctgtttgttcaattgcttctaaaatctctaaatatcgtatgtttatcataataaatatcctcactatacatgaataaaattaattaattccattaaattctatcattttacagattgcaaagcaacaggtatactgaataatatgaagtgaaaagaaggaggaatattttgaatcaaagcagaaaaatatatttttggcttttaattattaacttgtttattagcacattcacttttggcggagggtatgtagttgtacctatgattagacgttattttgtaaatcaaaagcaattctttacagaagatgatttgatgagtatggcagcagttgcacaatcaactcctggagctattgcaattaatttatctgctttggcaggttatcgagtagctggtactttaggggttgtcattagttgtacagcagctataatacctccactcgttattcttggattagtatcagcattttacaccacttttatatctaatgccattgtaactgcagtattaaaaggaatgcaagctggtgttgctgcactaattgtggatttgattattgacatgtgctctatgatattaaaacaacgttctttgtttttatcaactatgatacctattgctttctttgcaaactttgtgatgagtataaatgtaatttttatattatctgtttgctgttttgtatgtgtaatgcaagttttctataagaagagggaaaataaatgaatacaatttggaacttattttttatatttttaaaaataggcttgtttagtattggtggtggttatgcaatcatacctttaatccaagagaaagtagtaaatcaaactggatggataagtgagaaaatgtttacagatattataactatttcacaaatgacaccagggccactggctgttaatacttctacttttgttggacttcaaattggagggttttggggagcagttgcagccactttaggttgtgtattatgtggtgtagtaatatctctatttttatataatttttttcaaaagcatcagaactctacttatatatttgaaatattaaatggtctaaaatcagcttcattaggtttaattatctcagctgcggctacaattataatccttgcattatttgggacgaataaagtgtacttcaattctatatttgagatgctaaactggactgcactaataatcttttttgttatactactgatagtacgtaagtggaaaattaatcctattgtgattataataataagtggtatactaggaatatttttttatttataagtttttggtaagtaaaggatatctatttttttatatcttaaatccaaatagccaataaagtaaggctatttggatttttaataaattctgaaaagataatcagaaacccatataacatttaaattatatcactggttttctacaaaccaatcataagcttcttggcaaaatttctcactatctatatagtaactattatgaacattattaatttcaacaagtttctttttacattttagtgaattataatagctatcaaaatattgggttttaaaatatctatcatgaagtgttttaaagacaagagtaggtatgttgactccatcttttatcttactatcttctgcaataaagcattctaacattgtattaattatctttgtactatttttccaaatatgaggatttttcttttcaaatattttataaaattcattatcatagacttcattataacctttatatttaggtggttttactgttatgtgaaaattaggaagaaacttaaagaaaaaatataataatttttatgttctgttttatatattattcatattttatcacagataatatactaaagttaatttttttattgtacaactattataataattcttctataatataagacattctataattttatatttaagttcatgtgtatttaattgtttttatataaaatgtccagtaatactatttggatttatttttatttcatcaggagttccagaagcaacaatttcccctccatttattccactgtctggacctatatcgataatccaatcagaagcacgtataacctctgtattgtgttcaataattaaaagtgaatgctgttcatttacaagttttctaaaagtaatcaacaaattttctatatctttaaaatgaagtccagtagtaggctcatccaatatgtacagcattcgttttttagtttttgtccctaattcttttgctaattttatcctttgagactctcctccgcttaatcctaatgtattttgtccaagctttagatatccaagtcccacttcatctaataaggagagttttctatatatatcagagcaatcactaaaaaatgtttttgcttctgctacttccatgtcaagtatatctgcaattgtttttcccttgtattgtatagacagtatttctttttgatatctcttaccttgacattcattacaagttacccattggtctgccatatattgtagaataatttttgttttacctaatccttgacagtttgggcattgcccctttttgctattaaagctaaaatagctttcatccaataatttttgttttgcttgtggagtttcagtaaatagagaacgaatttcatcaaaaatattgatatatgtagcaggtgtagaacggctagattttccaataggtgtttggtccattaagataaaatcgtcaatagcatcaaatccagtaagtgcagtataatttttatttgggatagatttttgtttcaatttttcttctagagcaggaagtaaactgtgaaatacaagagaactcttaccagaaccactaacacctgtaatagagcacatacagtttaagggaatttctacatcaatattttttaagttatttgcatggcatccctttaagcttaaccatttacttggtataattttattttgtgaacttatcttattgtatgtactcaaatatttgcctgttatagaatttggattttttataatttcttgggttgtaccttctgcaatgatgaagcccccttttgtaccagcatttggtcctacatcaataatataatcagcagacagtattgtatccttatcatgttccactactataacagtattacccttgtctcttaattcttctatcattttgatgattagattatggtctcttggatgtaaaccaatagatggttcgtctaaaatataggttaatcctactaattcacttcctagctgacttgataatcgtactctctgcagttctcctccagataaagttggagctgttctatctgttgatatatagctaagacctacctttaatagataactaactcgaatttttaattctgttaagatatcatttaccaaagatagctcatttttttgaagttgatttggtaattcacacaaccaattccataactgttctatcgtcatttttgttagttcagggaagcgataacctttgattgtagtgaatctagcctcaatgcacagcaattcgccaccacatgtattgcaaggaattttgttcatatattgatgcaaggtattattttcagaactagattctctaaaaagtctttgaatgtggttgattgctcctgaagcaggccttctaatctttgattctcgtccctttgattcaaagctaaattcatatatcttatcgtctgtaccatataagattgcatctataaaatctcttggcaattcattccaaggtatatctaggtctatatttttatcttttgctattgcatataattcacctaccatccaattaccatttggctttttccccctcaattttccaaaatagtaagtagctccatctaatattgaaatagttgggtcttttacaattaattgaggattaacttgataggtaaaacccaatccattacaatcgtgacaagctccagtatgggagttagcattgaaggttgaagtatttatcttagaaaaaatagtttggcaatgtggacaataattttttgtattattctttttttctaatggagttttgcaatatggacagtaactttttccgattgatacaaataacattcttaagtaatcccaaatgcttgtaagagtaccaacagtagaacgaggattttggcttccttttttctgttcgatagctatagtaggggttaatccctgaagtaaatcaaattccggtttttgaagctgttctgaaagttttgctccattacctagattttcaaaataacgtctttttccttcttcataaatcgtatcgaaagctaaagaagattttccactaccacttacacctgtaataacagttatttgattttttggaattgtaacctcaacatcctttaaattgttttgccttcctccttttagatagatagagcttttattatgacaaagtgaatttttaattgatttatttattgcttttgcaaatttgaatttcttttctagttcaagaggattgcctaattcttttatttccgaaatacctaatatttttaactgagaaaagattgatttcaaataatcttcaggcaatttttctattaacaaattaaggtcttctatttttatatttccgcttgataatatctctgccatttcatctaataaatttttttctgctcttgttaattgattgtattttttggaacttaattctgtccataaatcccatggaagcaattctaaaccaatcatattattaaagtcatgtagaagattaccctttacagaatgccaacctttccaatttttattatatccaaagtcatctggatgagcatgtccttgtcgacatcttatccaggcttctgaaccagttaaaaaaccatctgtttttccgacatcatgagtgtcaaaattaatttgaaaataatttttttgtatgtcatctatttgtgcatctattcttatccatctctttgttagagtatcatagtattctacaagccagtggtcttcataagtaagctcattttcaaaataattagcaaaacctgctctcattctagcctcaaaacctcgatatcttaggagcgatacaagaagtaaagaataatctctgcacattccaacaagcctttgttttgggtttcttggaatagttagtgggttagaatttatttcaaatattctttttaacatttgaggaattgtacgaagcaattcctcatcagattgttgcttattaaaggatataccatataattttccttggtctccatgaattactaggctttgaaccacttttaataactcaattggagtctttggtaaatcttgatatttattttcaaattttttaggatttgtgatgatgctttgatttttatagttatttattttcatttatatttcacctctctaaatggatgatataccctgacatggtgtcatatgcaaggacaatttagattttttggccaaaatttaaaaataaataaaaaatgatacagtgataaattgtaatacaaatatagtttcaaattgcatataatataattatttaataaaaccattatctatggaatgttaatgaaatgttaagatggcattcttgaatattaagaaatagaatactataatatagtgtgaaggattcttagtaaaaaaatttgtaagtgttaatatacattaaaaaataggtttataatttggaggaaaaaaatgaaattatcaaggtataagaaaaatagtttagttctgtctataattttatgttcacttattatttcaatccttgtaattactgtttttaataccgtaaaactacacaatatatctaataaacaatctaaaaactatttaaacgatgtatctacacagattgtaatgaatgttgattctaaaatcaaatttattttatccgacttaagaataatggcagattttattaagcaatatgaaggtgatagtcgatatgagtatttatctaaaagaaagactagttataagtattatgatgttggaataatagatttagaaggtaaagctgagtttttaagtggaaaaaagtttgacttaaagaatactgcttcctataaaaaaggaattgaaggtaaagaatactcagaagtaatagagtcaatgggttttgttctttatagtgtacctatatttaacgataatcatgaagtgtctagtattttaataggtgtatccaataaagaaagcatggatgagattcttaatatagatagctttaatggagaaggaactattgaaattattaatagtcagggaaaaactcttttcataggaaaaaataatgagttaataaaagaccttagctataagtataaggattctgcagatgaaccttgggcacaaaagatgcttaatgattttaaaaatgataaatcaggaaatattacaataacctcatcaaaaggtgtacaatgcttattaacttatcatccaattacaagaggtttaaatgattggcattttcttctcatagtacctgaagatgttgtacttggtgaacttaataagttaaattcttttacaataataatgacatttataactacatgtattattggaattataacattaattttatatattataagaagaaaatatgtaaatcaaatagaaaatattgcatatttagatagtataacaaatggtataaattcaactaagtttagtatgctagtcaaacctttaatttcagaatcacctgatagtacttatatgatgatagcaatgaatataaaagattttaagctaataaatgattgtttcggtagtgaaaaaggaaatatgacactaaaacatctttacaatattttgtataaaaacattgatgaaaatgaagaatttgtgtgccgtcatgatgcagaccttttctatttgcttattaagaatagaccagtgttagaagccctggagttattatataaaatagaagctgacacaaattattttaataaaaatagggaaaatccatactttttaagactatcagtaggtatttacacaattgaaaatcataatgaagatttaattacaatacaagaccatgcaaatacagcaagaaaaagctttaataaaactcatcaaagtgatttttctttttatagtgatatagaaagaaaacgattaatatctgaaaaagaaatttcaaatttaatggaaaaagcccttgaaaataaagaattttttatgtgcttacaacctaaaattgatataaaaagtggaaaaattagtggagcagagtctcttgtgcgttggaaaaattcagaaaagggcataatttatccaagtaattttattcctcttttcgaaaaaagtggatttatatgtaagttagatttatatatactagaagaaacatgcaaattgatttctaagtggataaaagaaggtaaagaagtgttgagaatttctgttaatgtatcacgtcaacatttgaatgataaattgtttttagaaaaatataagcatatatgcaataaatacaatgtaccaacatgtctgatagatttagaacttaccgaatctattttcttagaaaatccagaagctatagatataatagaggatattcattctaatggatttaaatgttctatagacgattttggatttgggtactcatcattagggatattaaaggattttaaagttgatataattaagttagaccgttcattctttgttagcaaaaataatatagaccgtggtaaggtagttattaagtctattattgaacttagcaaaaggctaggtatgaaagtaactgctgaaggaattgaagaattagaacaagttgagttcctaaaaaatgtaggatgtgattatattcaaggttatgttttttctaaaccattattaatttctgattttgaaaattttgcatatgaaaataataaaattaaaaatatccattattaaatgtacaagataaaaaatttaggcaagttatataattaaaaatataacttgtcttttttatttatatatttaataaaaatatatttgcagattttgtaaaaataattttcaaatgttgtaagttgtggctaaagctttattgtattattctgaatatagaaagatagttactgtcttagataaaaactgaaacatacataataatataaaatttgctatattaataactctaattattttggaaggagggaaaatatgataagtgggagaatgttactcatcatgaattttctaaaaggaaaaaataagacaagttacaaggatattagcaaacaacttagtatagaagaaagaaaagttagatatgatataaataatttaaatattgttttgcgttcattaaacaagtcagtaatacaaaagatgaacaaaggtgtgttaattattcctgatgacttccaagtagtatgtataaataataacgaatatgtattttccttaactgagcgagtatctattatgaaaattatatcaatgtttaaaatagataatctaaacttagaaaaattgagtaaagaatttcaggtttctagaagttcaattaaaaatgaccttaatgttttgtcaagtgaattagaaagaaaccaaataactattacttatgataaatcttttaaaataagtggagaagaagaccttatatataagcaaagattgaacatattaaaatcgtattcttatctttttggtaaggaaaaatctgatttaagtgtatttgagaagtatttagtgaatgtaattgaaaaaatattcaaagggatttatttgattgatatatataattggtctatgaatttattattgcaaatgggatggactttaaatgatgaatcttttacatggtatgtgtcaaacattttcctttttacatggtatatacattcagatgaaaaacatcctttagaatctgcttcattaagtgagccatgttttgaaaataagtttgaccaagaatttgaaacaattattcaaaaaaagttgactaaggaacaaatttttctgttaaagagttttgtattttttacaaataaatatgcaagtttaaacgaggatatggatttgattagtacagaaattatagttcaagacctaatttacaatatgtcagaaatattagagattagctttaaagaagatatgattctttataaaggattactcaatcatattgccccattgatagagagaatcaagcagaatatacagatttatgaggaattacttcatgtaataccagataaatatcaatatgtacttgaagctactaaggtttctattcaaaaaaacagagttttaagtcaaataaagaatgaaaatgaaataatacttttggcaatacatttcttaggaagtatacatagaaatgagaggaataactacaaaaatatattgttagtttgtggatttggatatggtgtaattgctatgttaaaggatagtttagtaaatgattaccagataaatatagtagagagtattccatcatataagttacaagattataaagaatgggaaagtattgacttcattataacaacatcaaagatagtaatagacttgcctaaaacaattattgagataaatccatttttacaagaagaggattatttgaagtttgaagaaaaagggataaaaagaaagaacgtcttaactaattatatgtcaataaaaaaaaggttggactttttagaagaagatgctcaaaaaagagtattaagtattatatgtcaagaacttggatacagtgatgagagaatattatttagacaacttaatttaagtgatttaatagggattgataccataaggataattgatgaagatatgaaatgggaagatgctgtaaaaattagttcaaacatacttgctaattgtgattttgtatcagcacaatatgctgagaatattatagatattttaaaaaatgtgggtttttatgctgtaaaagataacgaatttgctttactacatggcaatgatagttcattagtcaaagtaagttcgataagtttattaatatgtaaagaagcagttagttttggagataaaaaggttaaaatcatattttgtctagcaagcagagataaaaaagagcaaattcctgcaataattaatctaactaaaatggtttataagactaattttattgctatgttagaaagtgcaaagacaaaagaagaagcagaagttttaattcataaatatgagaaggaggtcactgtatgaataaattagttaatgtaaaatgttcatttaaaatacatgctaattcaaaagaagaagctattgtatcgttagttgatgtagtatcaaaagaaggatatctaatagataaaaatcaatttttggaagatgttttaaagagagaagaaacattgtcaacttatattggacatggtataggtcttcctcatagtcaaagtgtaggtgttaaaaactcttgtattacaataggaaagcttgatattcctattgaatggacagaagaaggagaaaaagtggatttaatatttttaatatcagtaacaaaagacaatgaaaataatcttcatttaaagattttatcaaaattagcacgtttattgatgcatgaaagttttagaaatcaaattagatgttcagatgaacaaactgtttataatcttataaaagaaaaaatagaggaggaagattaaaatgagaattttaaagtttttgcaaaaacatcttatgacagcaacatcttatatgattccatttgtggttgcaggaggaatattatttgctttatcagtaactctaagtggacaagctgctgttcctgaaacaggctggttggctaaactgaatcaaattggagctgctggcttggctttattcattcctatattaggtggatatatagcatttagtatggcagataaaccaggattagctccaggtatgataggtgcatatttagcaaaagaagtaaatgcaggttttataggtggtatcatagcaggatttatagcaggatttgttgttttacaattaaagaaaattaaattagctcctacaatgagaactttaggttctatatttatttatcctttgattggtacattgattacaggtggtataattgtatttttaattggagaacctatagcttcttttatgacatggatgacaaactggttaaatggaatgtctggtgtttctaaaattcctttaggtggaatcttaggaggaatgatagcctcagatatgggtggtcctataaataaggttgctgctacttttgcccaaactcaagttgacacacttccatatttaatgggtggagttggcgttgcaatttgtatacctccaattggtttaggattagctacattattgtttccaaaaaaatttagcaaggaagaaagagattcaggtaaagcttcgctattaatgggatgtgttggaattacagaaggagctattccatttgcaacatcagatccagttagagtaataccttgtattatggctgggtcgattataggaaatattatggcttttttattaggatgtttaaatcatgcaccctggggaggtctgatagtattacctgtagttgacaataggttggggtatattgcatcagtattaactggagcagtagttgttgcagtattaatgaaattagtaaaaaaagacgtgaaagaagatgaagaaattgaagaggatttagatgaatcaattgaattaatatttgaagaattataaatataaatggaaggaatttgtataaaaaagtaaatataaaactataaacttaaaggagataagaatatgaaaattgtagcagtaacatcttgtcctagtggagtagcacatacttacatgtcggctgaatcacttgaattatcggccaaaaaatttggtatagaaataaaggttgaaactcaaggaagctctggaatagataatgaattgtcacttaaagatattgatgaagcaacttgtgtaatattgactaatgatgttgagattagaaatatggaacgttttaagggaaagaaggtagtaagaatgagtgtatctgagataattaagaaatctgatgcattaattaagaaaataaaagatacttttcaataaaaattgatttattttacatataactcaaagatgtttttaaagaaatttttattaaaagcatctttgaaaatatcttaaaaatagaataaaaggagatatagtcatgaaaaaattaccaataaagactgtcgtacaaagattactagacttacaagaagaggggaaaagtgcaactcttttaggaattggtcctatgtcaccaaacttgttacaagcaagttttgaactagcaaaagatgatgattttcctttaatgtttatcgcaagtagaaatcaagtagatgcagatgaactaggtggcggttatgtaaatggttggaatcaggaaacttttacaaaagatattaagaagattgccgacaaagttggatttgatggtttatattatttatgtagagaccatggtgggccatggcaaagagataaagagagaaatgaccatttgtctgttgatgaagcaatggagttaggaaaaaaatcttatttagcggacattgaagcaggttttgacctattgatgattgaccctacaaaagacccatttgaaattggaaaagtaattccactagatgtagtactagaaagaactgtagaattaattgagtattgtgaaaacgagagaaaaagacttaatctaccagacataggttatgaggttggtacagaggaaaccaatggaggtcttacttcaactgagacgtatgaaacatttataactagactaaaggttgaacttgataataggggtttgccaatgccaacatttatagttggtcaaactggtactttaactagaaagacagaacaagtaggaacttttaattttagaaatgcttatgatttagctcaaatggctaagaaatatggagttggtttaaaagagcataatggcgattacttagatgatgtaactttattagaacatataccatctcaaattattgctacaaatgtagctcctcaatatggtactgaagaaactagggcatatttaaaattagcagaagttgagtgtaaattagaaaaagagggcctagttgataaaacttctaatatcagacatgttcttcttgttaatgcaattgaatgtggacgttggagaaaatgggtagtaggagaacaaaaaaatctaactactgaagagatatttaagaatgaagttttatctaatgaaatactagatattgcaggacattatacatttaataatgatgatgttaaaaaagaaatagaagtgctttatgataatttaagtaagaataatattgatggtcaaagatttgttgtagaccatattaaacgtcctttgcgtgattatgcagaatgctataacttaaaaggtgttactacgaggattttaaataaataataggacttatagtggtgagtattgttatactaggtatttatagttataattatacttaccactattaaatttaggaggactaatattttgattaatttaatttttgatgtagatgatactttatataaccaattaacgcctttttacactgcatataataaagtgttttcttcaataaaggatatttctattgaagatttatatatgagtagtagaaagtatagtgatgaggtatttcatatgactgaaaatggagaaatgccaatcaaagaaatgcatatttataggataatgaaagcttttgaggagttgggaaattctattacagaaaaagatgcacaaagttttcaagatgagtatatatatcagcaatcacaaattacactaataccagaagttgagaggattttaaatttttctaaagaaagaaatattaatctaggaattataactaatggcccatcaaaccatcaaagaatgaagttaaagcagttaaatattgaaaattgggttgataaaagtaatatttttatttctagtgaggttggattttctaagccagatactaatatttttagagtagctgagaatgttatgaatttagatagagaaaatacatattatgtgggtgattcttatagaaatgatgtattaggtgctaaaaaagctggttggaagagtatatggttgaaccatagaggacatgaggtagaagagttgttttataaacctgattttgtaattttggaacataaggatttgatatctttatttataaaaatatgtagttataaaaatatgtagtaaaaaaatgttaataatagaattgtataaaataattaataataactatataaaattatatgtttagattgtgagcaatctattttatgttaaaaatagattatttagaagaaggggaaatcttaaaaaaatttgaatatcccctttttattatttaattaaaatgaaatagttagaaatatattttatttagtttagtcaataacattttgggattctttataactacatgttaactgttgaataggcttatcatatggtttaacccatcctttattaatacttaattctgtaagtgctgtgtgaccttctaccatttgagttagtgaagctgaatatatagctcttaattcaggtgtactacttgttaatgcagaattaagatacatattggcagatgctttagcagatgaaagcatacttaacattattactttatcgtctatataagtattgttcttaattagattttctatcatatttctcatgttatctatacctcctcagaaattagtatttcattttcaactataaattgttgtatagctttaattcttccttctgttgctaatatactagattctgattgtctttttaggtcttcatctgatattaacatatttattgctctttgcataagtaatccgtcagactccatttttataactgctgctaaagatattttttcagtttctgaaagtgttctcatttaatcatctcctatattgtaatttatgctttaatagtatgtctttcttttcaaggaaataaccattacacttttttacagtattttatattctctttatatcaaagtttagtcaacttaatatattaatataattttgtaggatatttatcattaaatatctataaaataaattatttgaatattcataaatcaaaatttatttgtatgtacttcttcaagagtcaatatgaattttttcaaaaaattaattttgatgataatcattaagggctatatttttcctaaagttgtgattatcattattaatttactaaaatactttaatgaaaaatagctaactttaattgtaggatattcttaatatatttgaaataaataaaaatattgaaggatataatattcaattggtatataaataataaatgatagttaagatttaccttagaggctaattaggtgttcagtcaaaattaatgcctttagaatacaaatgtattctaaaggcatttttactatgtattttcatttatattactaaacattatctatttttatatacatttctatgtattttattttcatcaaatcggtctataaattcatttttttcttcactatatccaatagatataagtgcataaggaactaattttactggtaagtctaaaatttgtttaactttatttactactttatttttaggaaatactcctgcccaacaagcagctagaccttgattagtaacttctaataataaattttgtgtgcaagcacctaaatcttgtatccatttaccaggttttaagaatttatctctatttccaagcactactatacataatggtgcaaattctatatgctttgctctatgctgtgactttgagagctctttcagcagttccttatcatctactataataaattcccaaggttgagcattttttgatgaaggtgcttgcatagctgattttagtatttcagttattttatcttcttctatatttttatctatatatgttcttattgaacgtctattttttataacttctaacatacagattctcctttaaataaaattatttctatttatataatatcattactttaagttttagctattacttatataaagaataaactttgtgttggttttatctaagtaaaagtaacattcagaactaaaaaacaagactataaatccaagatattaattaaaaaagaagtaataaaaaataatatacaagatttaaaaaagagtattgagcttaaaatttaattagaaaaccaattttgagataatctgttttttattttaacaaaaaaacataaataaagttcgatacgtagcgaatgaaaaaaatacaagaaatattttttttaaaaaatttcaaaaaagagttgataatatatgtatattaatataaaatttaaggtgtataattcgtataataatacgaatgatttgtagtgtaaaataacttataaacggagaggggaagtctaatgaaagtagcagtagttatgggttcaaaatcagattatccaaaattagaagaagggataaaactgcttgaaaaatatggaatagaggttgtagcaagagcattatcagctcatagaacaccagaacaactttcaatattcctaaaagaaatagaagatgatactgatgtaataatagcagcagcaggaaaagcagcacacttaccaggtgtaatagcttcacaaacattaattcctgtaataggattacctattaaatcatcaactatggatggactagactcacttttatcaatagttcaaatgccaaaaggaatcccagttgcaacagttacaatagacttaggtttaaacgcagctttattggcattacaaataatgactttaaaatacccaaaattaaaagaggatttgaaatcatatagagaagagatggcacaaaaggtgttagaagacgacaagaatttaagggggtagcagaaatgttattatatgaaggaaaagcaaaacaagtatattctacagataatgaaaatgaatatgttgtttattataaagatgatgcaacagcatttaatggagaaaaaaaagcagaaatatcttcaaaaggtatactaaataataagatatcaacaataatctttgaaatgttaaaagaaaataatataaatactcactttataaaaagtttatcagatagagaaatgttagttaaaaaagtagagattttaccattagaagtaatagtaagaaatattgctgctggttctatctgtaaaagagttggtcttgaagaaggtgtagttttcgatgagccaatttttgaaataagttacaaaaatgatgcttatggtgacccaatgctaaatgatgattatgcagtggcaatgaagttagcaactagagaagagttaaaattcttaagagaagaaactttaaaaataaacgagttactaaaagcatttttcttaaaattaaacctaaagttagttgactttaaaatagaatttggtaaggattctgaaggaaatataatattggcagatgaagtatcaccagacacttgtagactttgggatgtaaatacaaatgaaaagttagataaggacagatttagaaaagaccttggagaccttgtagaaggttatacggaagtactttcaagaatgaataataaataggaggcaaatgtatgtgtggagttttagggatttactctaataaagatgtaactaaagaactatattattctttatattctatgcaacacagggggcaagaaagctgtggtttagctcttttagatgatggagaaattaagtacaaaaaagatatgggattagttggagatgtttttaaggaaaatgaattatctaagttaaaaggaaatatagggattggacatgttagatattcaacagctggaggaagtcatgtttctaactgtcaacctttagttggaagttgtagaaaaagacaattagccatagctcataatggaaatctagttaatgcaaattatttaaaagatatgctagaagaagatggatatatgttccaaactaattcagatacagaagtgattttatatatacttgctagatattacaaaggggatatagtagaaagtttaaaagtgacaatggattatataaaaggtgcatatgctcttgtaataatgagtcaagaagaattggttgcagttagagacccacatggattcagacctcttgtacttggtaaaaagggtgatgaatatatatttgcatcagaaaattgtgcaatagatatacttggcggagaagttataagagatgtagagccaggagagataatagtagtcaaagatggagaactaaaatcatatttttattcagaaaattataaaccagttaagaaaagttgtatatttgaacacatatactttgcaagaaatgatgcaactatagacaatgtaaatgcatatgaatttagaattaaatgtggtgagagattagctcagaatgaaactgtaaaggcagatatggtagttccagttccagattcaggttggccaggagctattggttatgcaaatgctagtggattaaaaataagtgaaggcttagttaaaaatagatatgtaggaagaacatttataaaacctacacaagaagaaagagaaatagcagtaaaaataaaattaaatcctctttcaacaataataaaaggaaaatctataattttagtagacgactcaattgtaagaggaactacatctaaacaattagtaaaatctttaagagaagcaggagcaaaagaaattcatcttagaataacttctcctccagtagcttactcttgttactatggaatagatactccaaatcgctctaaattaattgcatcaagtaacaacgtagaagaaatgagagaatatattggatgtgatagtttaaaattcctagatatagaaggaatgttagatgcaacagaacataagtctactttctgtaaagcttgttttgatggagaatacccagttaagaaaattgataaggaggaactactttcatgttaacatataaagaatcaggtgtagatatagatgaaggaaatagagcagtagaccttataaaaggtaaaataaaaggaacttatgatggaaatgtagttggagatttaggtaacttcagtggattatacagtttaaaagattttgtaggtatgaaagaaccagttttgcttgcatctacagatggtgttgggactaagttaaaaatagctcagatgatggacaagcatgatactgttggaatagatttagttgcaatgtgcgtgaatgatttaatttgtcaaggagcaaaaccattatttttccttgactatatagctcttgggaaattagtgcctgagcatatcgaaaaaatagttggtggaattgcagatggttgtaaaatgtctggttgtgcactaattggtggagaaactgctgaaatgcctggaatgtatggagaagatgactatgatttagcaggattttctgtaggaatagcagacaaagaaaagattgtttctggaaacaatgttaaatcaggagatgtattggttggtatatcttcaagtggagtacacagcaatggattttcttttataagaaagatatttttagaaacttacaattataaaatggaacaatatgttgaagaactaggaatgacagttggagaagcacttttaacaccaactaaaatatatgttaaattagctttagatgtattagctaaacatgacataaaagctatagctcacataactggtggagggcttatagaaaatataacaagagttatacctaaagggttaggactagatatcaataaaaaatcttgggagaagcctcctatatttaaaatgatagaaggttttaatgctgttgatgagagagaacttcataagagttttaacatgggtattgggctagttttaatagtagataaagaaaatgctgatgatgttgtaaactttataaataatagagaaaatgacaatgctgcttatgtagataaaaaatacagtgaattattagaagataaagcgtatataattggtgaagtagtagatagtcatgaaggtgtagaattatgctaaatataggagttttaatatctggtggaggaacaaatttacaagcagttatagatggcactgagtctggagaaataaaaggtcaggttaaagtagttatctcaagtaagcaaggtgcttatgggctagagagagctaaaaatcataacataaaagcaatttgtgaaactgatgaagacaagataatagagattcttaaggaaaataaaatagatttagtagttttggctggttatttaaaaataatcagcccaaagctggttaatgagtttagaaacaaaatgataaacatacatccatcattaattccttcattttgtggagctgggttctatggagaaaaagttcatcaaggtgttatagattacggagctaaagtaactggtgctacagttcattttgttgatgaaggtgctgatactggaccaatcataatgcaagatgtagttaaggtaaatcaagatgatgatgcaaagacacttgcaaaaagagtgttagaagttgaacataggattttaaaagaaagtataagtcttttttgtgaaaataaattaaaacttcaaggtaggagagtgtttataaatgagtaagagagctttaataagtgtaactgacaagactggtgtagtggaatttgctaaggagttaaataagttagattatgaaattatatctacaggaaatacatttaaaacattaaaagaaaatggtgttaatgtaatgcaagttgaagatgttacaaattttccagaaatattagatgggagagtaaaaacattaaatccatatatacatggtggtatactttataaaagagataaagaatctcatgtagaaactgtgaatgagcataaaatacattcaatagatttagtagctgtaaatctatatgattttgaaggaactttaaaagctggaaaaagtcatgatgaaataattgaaaatatagatattggtggaccatctatgatacgttctgctgccaaaaactataaagatgtaatagtagtagtagatataaaagattatgattctataatagaaaaattaaaaacagatacaatgacattagaagacagaaaaaaattatcatataaagctttctcaactacaggaagatatgatgcgttaatatctagttattttgctggagaagttggagatacatatcctgacatattaaatttaactttccaaaaagaacaaactttaagatatggagaaaatccacatcaaaatggtttcttatattcacaatcaaatgcaaaaaatccaatcttaaattatgagcaattaggcggtaaagaactttcttttaacaatttaaatgatttacatggatgtttagaagtaatgagagaatttaaagatagtgaagaagtagtttcagtagctataaaacatgctaattcatgtggggtaggtctaggaaaagatgcttttgaagcatatacaaaatgttatgaagcggataaggtttcaatatttggaggaatagtaggaataacttctactatagataaagctacagcagagaaattaaatgaaatattcttagagatagtagtagcatatgattttgagccagaagctttagaggtacttaaacaaaagaaaaatttaagaatattaaaattagctaagatagaagatagtttacaaccatatgaaatgaaatatttagatggaaaattattaatacaagatagaaataatatattagcagaaaaaagtgaaaatgtaacaaaagcaaaaccaacagatgcacaacttaaggacatggaatttggtatgagagtagtaaaaaatatgaaatcaaatgcaattgcgatagtaaaaaatggtcaaactttagctttaggttgtggacaaacatcaagaatttgggcattaaaaaatgctcttgaaaataacaaagataaagattttacaggagctgttttagcgtcagatgcatttttcccatttgatgattgtgtaacattagctcatgaatatggaatatcagcagtagttcaaccaggtggctctataaaggataaagattcaatagaagcttgtgataagtatgatatggttatggtatttacaggaataagacacttcaaacactaaggaggatattatgaagatattggttgtaggcggtggcggaagagagcatgctatatgctggaaactaagcaaagaaaaaaatgtagaaaaagtttattgcgcgccaggtaatgcaggaattacaaatgtagcagaatgtgtaaatataggtgatactaatatagaagaacttttaaaatttgccaaagaaaatgaaataggtctgacaatagtaggaccagaagtaccactagttatgggaatagtagatgagtttgaaaaagaaggattaagagtatttggacctaataaaaaatgtgctcaacttgaaggaagtaaagctttttcaaaagaatttatgataaaacataacatacctactgcaaaatataaagaatatacaaacttagaagaagctatatcagaaatagatagttttggatatccagtagtaataaaagcggacggattagctgctggaaaaggtgttgtaatacctgaaaatagagaagatgctatagcaactttaaaagaaatgatgtcagataagaagtttggagctgctggagataaaatagtaattgaagagtttttaaaaggaatagaaacttcaattctagcatttgtagacaatgatacaatagttcctatggcaagtgcaaaagaccataaaaaagtaaacaactatgagcaaggtccaaacactgggggaatgggaactttttcacctagtgaaatatatacagaagaattagcaaataaagtaaaagagacagtattagaaaaaactttagaaggcttcaaaaaagatggacttaattttaaaggtattttatttgttggtcttatgataactgaagatggagaaaaagtacttgaatataatgtaagatttggagaccctgagacacaatctgttttatttagattagaaacagatttacatgagataatggaaactatactagataataagttaaaagatatagaaataaactatagtgatgatgaagctgtatgtgttatgcttacatcaggagggtatccagacagttatgaaaaagggaaaattataactggtcttgaaaacttggatgatgatatagtagtattccatagtggcactaagatgcttgatggtaatttagttaccaatggaggaagagtaattggtataactgcaaagtcaactacagttaaggatgcagcagaaaaagtttatgaaaacataaagaagataaactttgaaggaatgcactatagaacagacataggaagataatttttctaaaatggaggataaggtatgttgaatactgaaaataaagactcaatggttagaagagtattagttgaaaaaagagaaggttttgaccttgaggctaaagctttaaaaaaagacttagtagaaagtttacacatagataatatagaaaatttaagaatattaaatagatatgatgtagaaggaatatcagaagaagtttatgaaaatgcagcaaagacaatattctctgaaccaaatttagatgtagtatattatgaagaaataccaaaattaaatgatgaaagagtatttgcaatagaatttcttcctggtcaatacgaccaaagaggtgattgggcagctcaatgtgtacaaattgtaaatcaagggataagacctgctattaatacagcaaaagtttatatattatcaggcaaaataactgatgaagagttttctaaaataaaagattactgtataaatccagtagatagtagagaagcatctttagaaaaaccagaaacattaaaaatggaaactgaaataccaacaacagttgaagtattagatggatttatagatttagatgaaaatggattaagaacatttgtaagtgaaaaaggattagcaatgactttaggagacttacaacacgttcaaaaatactttaaagatacagaaaagagaaatccaactataacagaaataaaagtattagatacttattggtctgatcattgtagacatactacttttatgactgaaatagaaaatgtaaagatagaagatggtaagtttaatgatatagtaaaagaagcgtatcaaatgtatcttaactcaagagacaatgtatatgtgaacagacataaagatatatgtttaatggatatagccactgttgcagtaaaagaattaaagaagaatgggaaattaaatgacctagatgaaagtgaagaaataaatgcatgtagtataaacgtagatgttgaagttgatggtaagatggaaaaatatctagtaatgtttaaaaatgaaactcacaaccatccaactgaaatagaaccatttggtggagcagctacttgtttaggtggagctataagagacccattatcaggaagaagttatgtttatcaagcaatgcgtgttacaggaagtgctgacccaagaacgactttagaagatactttacctggaaaacttatgcaaagaaaaataactacagaagctgctcatggatatagttcatatggtaaccaaataggtcttacaactggacaagttgcagaagtatatgatgaaaactttgttgcaaagagaatggaaataggtgcagttatagcagcagtaccaaaagagaatgtagtaagagaaagacctgaagcaggagatgtaatagttcttcttggaggaaaaacaggaagagatggttgtggaggggcaactggttcatctaaagaacatagtgaagagtcaatcttaacttgtagtgcagaagttcaaaaaggagatgctcctaacgaaagaaaaatacaaagattctttagaaataaagaagttgctcaaatgataaaaagatgtaatgattttggagcaggtggagtttgtgttgctataggagagattgctgatagtttagatataaacttagacttagtacctaaaaaatacgatggacttgatggaactgagcttgcaatttcagagtcacaagagcgtatggcagtagctataaaaaaagaaaataaagataaatttatacaattagcagtagaagaaaacttagaagctacacatgtagctacagtaacagatacaggatatttaagaatgttctggaatggaaaagcaattgtagatataaatagagagttcttagatacaaacggagtaaaacaaactactgatgtccatgttactaaagtagatgaagaaaatacattctttagctctaatgaaatagtaaaagatgttaagtgtgcaagtatgaaagacaagtttacaaaagtattatctgaccttaatgtttgttctcaaaaaggattagtagagatgtttgataatacaattggtggtaatacagtacttatgccatttggaggaaagtatcaagcgactccaacacaaggtatggttgctaagataccagtacttggaggagaaactaatacttctacaataatgacttatggatataatccaaaggtaggaaaatggagtccattccatggtgccttgtacgcagtagtagaatctgtgtgtaaattggttgctattggaggaaattatagtacaacaagacttacattccaagagtattttgaaaaacttggtaacaatccagaaaaatggggtaaaccattctcagcacttttaggagcattttatgcacaaagtaaatttgagatacctgctataggtggaaaagacagtatgtctggtacatttaaagatatcgaagttccaccaacattagtttcatttgctgttgatacagtagatgcgaagaaagtagtatctccagaatttaaaaaagcagactcaaaagtagtaatgttatgtgtaaacaaggcagaaaatgatgttgtagattttgaggaattaaagagaaacttagacaaagtaagagaacttatacatggaaataaagttttatcaacatatgcattaggatttgcaggtgtaggtgaagcaataagtaaaatggcttttggtaataaaataggatttaagtttagtgaagaagctgaaaaaacatttacagatgataaattatttgaggctagttatggaaatatagtacttgaattagcaaatgatgatttatgtatgttagaaggatacaattatgttgtgcttggaagtacaactaaagaagctagtatatttatcaaaggtgaagaacttgcattagatgaattatataaagcacactgtagtactttagagcctatattcccaactaaaacagaagaagtaaaatcaaagatagagactataagttatatatcacaaggagaagctaaaaaatcatcattaagtatagctactccaagagtatttataccagcatttcctggaacaaactgtgaatatgactctgcaagagcatttgaaagagtaggagctaatgcaaacataagagtattcaagaatttaacttataaagacatagaagattctatagatacaatagtaaacgaaataaaatcttctcaaataataatgttaccaggtggatttagtgctggtgatgagccagatggttctggtaaatttatagctactgtatttagaaatcctagagtgcaagaagctataaatgaatttttaactcaaaaagatggactaatgttaggtatctgtaatggattccaagtattaattaaattaggattagttccatatggagaaataagagttccaagtgaaagtgctccaacacttacttacaataatattggtcgtcatcaagctaagattgctagaactagaatttcatctaataaatctccttggttagctcaaactaatgttggagatattcataatatagcaatttctcatggagaaggtaaatttgttgctagtgaagatgttatgagagaattaattgctaatggacaagtagcaactcaatatgttgactttaataatgaagctacttatgatattgagtttaatccaaatggttcattctatgctgttgaaggtataactagtgctgatggtagagtgtttggtaaaatgggacattctgagagaattggtgaggaagtatttaagaatattataggtgaaaaagaccaaaagatatttgaatctggagttaaatattttagataaagctttgatgtttaattgatagctagaatatataatttagatatttagatttaaagagatgtaataatatgatgataatcatttaatattacatctcttttttatttatctaagaaataataagttcaacctaagttaaaatacaagctgtgttataattaattactaagtaaaattaaatatttattggagggcaacataattaatgaaaatattaataacagggtctaatggtcaattaggaaaagaattggttagccaattagaagcaatcaatcaaagtataaatcaaccaaaatacgttatattagctacaacaagaaatgatttggatatatccaatcagactaatatagataattttattttgcataataaacctgatgtaattgtaaactgtgcagcatatacaaaggttgatgcatgtgaagataatatcgaaattgcgtataaaataaatgccttaggagtgagaaatttagcaatagcatcagaaaaagttaatgctaagcttgttcacatatcaactgactatgtattcaatggtttttctaaatatccatatagggaagacaataaaactgaacccaattctgtgtatggaaaaagtaaacttatgggagaaaagtttgttgaacaattctcacataagtactttatattgagaacagcatggttatatggtaatgggaataattttgtaaagactatgataaaactttctttagaaaataaagaggttaatgtggttaatgaccagtttggaaccccaacaagtacagtagacttagcaaaaattataataagaatcatggaaacagaacattatggagtttatcatgctacatgtgaaggtgagtgtagttggtatgattttgccaaaaagatatttgaattaaaaaatatagatataaaagtaaatccaattaagagtaacgaatttaaatgtaaggctcaaagaccactatattctgtattggataattttatgttgaagttaattggtttaaattcttttagaaagtgggaagaatccattgaagaatatttagaaagatatgatataaatgaaaagtaaatgtattatttttagaaaagaaaataagatattataaaaaatataaatatttcttttatttatccgataatcataatatgacaaaaacaaatttaaggatggaaaaagatgaaaggaattattttagcaggagggtctggtacaagactatatcctataacaaaatgtatatcaaaacaaacacttccaatatacgataaaccaatgatatattaccctatgtcggttcttatgttggcagggatacaagatatattaataatatctacaccaagagatataaaagcatttgaagaattatttggagatggaagttcactagggcttaaaataacatatgcaattcaggagaaagcaaatggaattgcagaagcgtttataataggagaagaatttataggaaatgacagagtgtctcttgtattgggggataatatattttatggatatggatttagtgaaaggttggagaatgcagttaaaagaaaaggagcaactatatttgggtatcatgtaagtaatccaaattcgtttggagttgtagaatttgataaggattttaatgtattatcaatagaagaaaaacctacagttcctaaatctaattatgctataccaggattatatttttatgataatgatgttgtagagatagcaaagctagttgaaccatcagatagaggtgaattagaaataacctctataaacagtgaatatctaaaacgaggaaaactaaaagtggaacttctaggaagaggtatggcttggcttgatactggtacacataaaggtctattggatgcttctaactatgttgaagtggttcaaacaagacagggactgtatatagcatgtttagaagagattgcatatacaaaaggatatataagtagagaacaattaatgaaactagccaagccactgataaaaactgaatatggtcaatatctattaaaattggctagtgaagatatgcaatatggtagataaaatttattataaattttattaagggagtttgttataatgggaaaaatcaatgttataaagactaaaatagaaggattatatatagtcgaaccaaatgtattttgtgatgaaagaggatattttatggaaagctataataaaaaggattttatagagcagggtcttgatatgtgttttattcaagataatgagtctagctcaagaaaaggtgttttaagaggaatgcattttcaggttagatatcctcaaggaaaattagtcagagttacagagggagaagttttcgatgttgcagttgatttaagaaaagattcacagacatttgggaaatgggaaggtgtaatattgtctgataagaataaaaaacaattttatattccagaagggtttgcacatggatttttagttttatcagaaaaagcagtatttaattacaaatgtacaaactattattatccagaatttgagcatgggtttatatggaatgacaagcaaatatctattgagtggcctttaaaaggaattgaagaaatatttttatcagaaaaggacaaaaaacaaaaaagttttaaagatatttgtataagacgttaataaaaatttattagaattaacatttaggagaaaaaatatgaaaaaaatactgataactggaggagcaggatttattgggagtaactttgtacattatatgcttaacaagtatgtagattattttattgttaacctagacttgttgacttatgctggtaatttagagacattaatagaaatacaagacagttccaattataaatttgttaaaggagatatttcaaatagggaacagatgtataagctatttgaagaagaaaggtttgatatagttgttaactttgccgctgaatctcatgtagataggtcagttgagaatcctgatttatttattaaaacaaacattataggaacacaagtacttttagatgcatctataaaatatggagttaaaaggtatcatcaaatatctacagacgaagtgtatggtgatttaccaattgatagaaaggatttattctttacagaacaatctcctatcaatccaagttctccatattcagcttctaaagcatcagcagatttgttggtaagttcttattatagaacatatggattgttaacaactatatctaggtgttccaacaattatgggccatatcattttcctgaaaaattgatacctcttatgattttaaatgctttggaaaacaaacaattgccagtatatgggaatggggaaaatgtaagagattggttacatgtatatgaccattgtactgctatagacttaataatacataaagggaatataggggagatttacaatataggaggtcataatgaaagaagtaatttagaagtagtaaaaatgatattaaatcttttagataaatctgaagagttaatatcctatgtaaatgatagacctggtcatgatttaagatatgctattgatgcaactaaaatagagaatgagttaggttggaaggcaaaatatgactttgatttgggtataaaagaaactgttaagtggtatatagaaaatgaatcttggtggaaagctgttttatcagtgtaactttgaaatttataaaatttagaaaggggcgttttatattgaatgagataagttcactaattaatatattagcattgactcaattatctggtagtaatactacaaatcaatgtaactgtacatataatagttcatctggatttgatatgattatgatgaccttgttaaaagcattatcacaaaataatcaacagacttctaatggctacaatttatcgtctaattctgagaatttatttgacgaactcggcagtgtagtaaataatacagctagtagatttatagatgttgatacaaaagataaaagtgtaaaatcaagaattgaaaatgctatagagcaagcatcaaaaaaatataatgtggattcgaatcttataaaagcaataattaaagttgaatcggattttaatccaaatactgtttcttctgctggtgctaagggtcttatgcaacttatgccagaaaattgcagagacttgggggttacagacccttttaatatagagcagaatatagatgctggaactagacatattaaggaatacattgatatgtttggagggagcatagaaatgggattgatggcatataatggtggtcctggaagaatgaaaagtagaggagtagaatcaatctctgacctgtataaaatgccaaaagaaacacaaaattatattcctaaggttatgaaatattatagagggtaggctttattatggggataaatatagataagctaaacataagtccaagtataaatatggaggttaaaaaactaaaagagagtaataaattttctgacaaattaaactctttaaaacaatcttcttcattggaagatataaaacgaaatttggaaagtgtaaaaaaggcaggagaaaggcttgtacttactcaaaactatggcgacattagtatatataaaaatgcagtaaaagaatacctaaaatctgttgtagataatatgtattcacttgataaaaatagtagcttttgggagcatcagtattataagaatgtaaagattgttgatagtaaacttgaggatatgactagtaagttaattagtgaagaaaaagaaaacatagatattgtttctactgttgatatgatacaaggcttgttgatagatatgtatagataaggttatacaaggagaaaagttttatgaatagtaaaaaagaggatatatatgaattgaattttgggcaattaatagaagaaaaatctggtgttatagaagaaaatcaaaatgtttttaatgcaaaagtaaatgtagctgtttctataggaaatacaacagaaacaataaaaaatatattagatttaaaagaaggctctataataaaactaagtaagaatgtggatgaaaaattagatatatatgcaaatgatagattgtttgcttatggagaaagcattattacaaatgagaagttatctgtaagattatctaaaatagaagattcagatgtaaattagtattttaaatagtatccctttaggctatgatgtatgagtttagctaaggggatatttttataaaaaatttaaaatatgcgtgaattatataaatgtttttattttatgagcgataattaaattataagtatgtaattttggaggtgaaactatggatattaaaaatgtaagttcaaatattgtagtgaataattatttaaagaatacatctggtgtaaaaaaagtggaagaagttaaaaaaattaataaaacagacaagatagagctatctaaatttgcaaaggaaatggcaagtgtgtcaaatatgagtgatgagaatattaggaataaaaaagtcgatgaaataaaaaatgcattagaaaatggaacttacaaaataaaaccaaaagaaattgcgaaaaaaatgatagaggatatgcgaggataaagtcatgattacagacttaaaagttataatatatgaagaaaaaaatataattagtaagatgatggaattattaaaagaacaatttgattatatagttgaaaaagacttagaaaatttaaatatgttaaatcctaaactagaagatattagcagggagcttgcatccatagaaataaagagaagacaactttttggtgatgatatttcaatgagtgaagttgttgaaaatagtaatgatagatatttaaaagaaatatatacagacttgaaacacattcttgctttagctaaaaatcaacaagaatcaaatgattctctaataaagaaagaacttatttttacgaaaaaaatgattaatttcataaaaccagctgataagcaaactgcaacttataattcttatggaaatattagaaaataaatattaggaggagaaatatggcaggattattttccattttaaatacagctaattcaggaatgaatgcgcaccaaaaagcaatacagacaatttctcataatataagtaatctagatacagacggttattctaggcaaaggactgagtttgctacaaatagtccaatgtatatgcctagtttgagtaattcaattgcaagaggacaattagggactggagtacacgtaacggatgtaacaagagctagaaatagtttttatgattaccaatttagagcagaagctcataagtatggtaatacagtttcaaagtatgactattataatactatagaaactataataaatgaaccatcagactatggaatatctgcaggtatagacgacttttttaaaggatgggaatcattagcaaaggatataaatagtgatagtaaaaaaagtctagtggtagaaaatgcatcaaatctagcaactttaataagtgaaagttataagaagcttaataagttaaagggagatatagacgataatataaactctgaaataaaacagataaatgacatgttaaaaagtcttgaagatttgaataaatctattgatgttatatctggttctggctctactccaaatgatttacttgatgaaagagatagaatattagatgacttaagctttaaattagaccttgaaaatagcgatgttaaaaatatgctttcagatggtaaattagaacttaatgaattaaaaaatgcagatggaacttggaaaacaggtgtatcaggaaccttacaaggcttgtttgaaatgcatggtaagattgatacatataaaagcgatttaaaagatgtatctgatgggttagctaagcagataaatgatgtttataatacatctgctggaataacagtaacagatttttttataacttcaaatgtagatggtgaagatatcataaaggtaaatccagctataaagagtaacccaaatgaattaaaacttactgctgatgaggcttcaaagattgctaagttaaaggatgaaaaaatagatattggggtggctggtggaaaagtaagtacaataagtgaccactataaagcctttgcagaatcagtaggtttagattctcaaaaagtgaatcaagatgaagtgaatcaacgtaaaattataaataatattgataactcacgaatgagtgtttcaggcgtatctttggatgaagaaatgacagagcttataaaaatacaacgctcctatcaagctagtgcaaaagttatgtcaacagctgtgcaactgttggatgttgtaataaatggaataatttaatagaagggggaatttataatgagagttagtacaggtatgatgtctagcaactatctaaactcactacaagataatctacaaagattagataaggttaatagacaagttaatacaacgaaagaaataaacaagctatcagataatccatataaggcaataaaaatattgaactcaaaaagtgaaataaaaactatggagacttatgttgagaattgtaaagatacagggaattggttagaaactactgatactgcattagatcagcttggaaaattattatcggacataaagaaaactttggtggcaagtggtgatggtgcatattcagatgatgagctaaagactcttagtaatgaaactaatgaaaagatgaaagaaattgcaaatgccttaaatgcaacacatgaaggaaagtacatattttcaggttcaaatacaggtgtaccacctgttgaatgtatagataatgctgacggttcagtgagcttaaagtttaattctagtttaaatcttaataaattaaatgactctttgagtatggatatagctcaaggaataagtgtagattataatgttaaattgagtagccttggatttgacccaacaaagactgacccatttgaagagttaaataatatatcaaagaaattagcaaatccagatgctgatgctataaaagagctgacaacaacttgtttaggcgacatggaacaattaatagaaaatacagtaaatgttaggtctatatatgggacaaaagcaaatacagtagaggctatgaaggaaaaaaatgatgatagtttgatacagttaaaggatattttgtcacaaaatgaagaaatagattatggagaaaaactcgttcaattaaaggcagcagagttaacttatcaagcttcactacaaacaggaggaaagttatttaatgtatctatattagattacatatagtaaaataacgcagatatgatgaaggttacattaaaaaaaggtatattaggttttgaaaatttaaaagaatatgagcttttagatatagaagataatgattctttaaaagaatttaattctactgaagaagaaggtataggatttgttgttgtatctccatttgagattatcaatgaatatgaaatagttttaaatcaggaaacaatagaaaaactagaagtgaaatctccaaaggatgttgtactatttaatataattactcttggtcagacatttgaagaatcaactgtgaacatgaaagctcctatagtgataaatataaaaactaattttggaatgcaaataattttacaggatgataaatattcaataaggcatccattattgagaggtgataatggatgctagtaatttcaagaaaaaaagatgaagcagtacttataggagaaagcatagaagtaaaaattgtaggggtagatggaaacaatgtgaaactagctatatcggcgcctaacaatataagtatattaagaaaagaaatatacgaaaaagtaaagagtgagaatataaaagctacaaataaaaatataaaaattttaaagtcattaaaataataagcttggaggaagtaatatatgtatggagaaaatccttataattcttataaacaaaatgctgtttttatggcatcaaaggaacaattgttacttatgcttgttgatggagcagtaaaatataccaaaatagccagagcagctatcttagataaaaatacacagaaagcgcatagagaacttgtaagagttcaggatatatttacagaactaatggttacattagaccaaaatgcaggacaatgggcaaaggatatgtacaaagtttatgattttgtaagatatgaactttcaagagccaatattagaaaagacatccaggtaatagataatgtgttgcctgtaatagaacaaattaaagacacatggcatgaagctgataaaaaaagtaaagaagaaagaagtaggtacaaataatggaattaaatttagctgaattagataagttatcaaaagaggaattactattgatgcttgtagatggcacagtaaaatataccaatatatccaaagaagctcttttaaataacgactatttgaaagcacataatgaacttataagagttcaaaatatatttacagaactaatgactacattagaccaagatgcaggtcaatgggcaaaggatatgtataaagtttatgaatttataaaatctgaattagcaatagctgatgaaaataaagatattaaaataattgatgatatattgccaatagtaaaacaaattagagatacatggcatgaagtttacaatcaactaaaaatataattagatggagggataaaggtatgtcaagtataagtcctataagagttacaggtctttcaggaaattttgatatggaaggcataatcgaagctagtatgattagagacaaggaaaaagttgataaagcaaaacaagaacaacaaatcgttaaatggaagcaagaaatatatagaaatgttatacaagaatcaaaagatctttatgataaatatctaagcgtaaattctcctaatagtatagtaagtgaaaaagcatactcttctacaagaataaccagttctgatgaaagtattatagtagcaaaaggctcagctggtgcagaaaaaataaattatcaatttgcagtttctcaaatggctgaaccagcaaaatttactattaaattaaattcaagtgaacctattgttcgacagttccctccaaatgccagtggagctagttctttaactataggagatgtaaatataccaatatctgaacaagatactacaagtactattgtaagtaagataaactccctttgcgcagataatgatataaaggcttcttatagtgagatgacaggtgaattgattatttcgagaaaacaaactggttcgtcatcagacattaatttaaaagtaattggaaatgacaatttagctcagcaaattgctaatgataatggtatcacatttgcaaatgatgctagtggaaacaaagtggcaagtgtatatggaaaaaatctagaagctgatgtaactgatgaacatggaagagtaactcatataagtaaagaacaaaattcatttaatatagataatattgactataatgtaaattcaaaaggaactgcaaagttgacttctgtcactgatactgaagaagctgttaaaaatatgcaagcatttgtggatgattataataaactgatggacaaggtctatggtttagttactactaaaaaaccaaaagattatccgcctcttacagatgcccaaaaagaagatatgacaactgaagaaatagaaaaatgggaaaagaaagctaaagaaggtatacttagaaatgatgatgagttaagaggttttgttgaagatattcagtctgcattttttggagatggaaaaaatattattgcattaagaaaactaggtatcaatgaaagcgaaaattacaataaaaaaggtcaaatatcatttaatgcagatactttttcaaaggctcttatagatgatagtgataaggtatacaaaacactagcaggttattcttcgaattatgatgataagggaatgtttgaaaagctaaaagatattgtatatgaatattctggaagttcaacttctaaacttcctaaaaaagcaggtatagaaaaaactgcttctgctagtgaaaatgtatattcaaaacaaattgcagagcaagaaagaaatataagcaggttagttgaaaaaatgaatgataaagagaaaagactttatgctaaatattcagccttagaatctttgttgaatcagtattcttcccaaatgaattatttctcacaagcacagggtaattaattatggataaattaaaagaaaaattaaatttatataaagatatatctttacaaattataaatttgattgaaaaggaagaatatataaagataagtagtaagttaggtgaaagacaagagattataaatagtgtaagtgaaattgatagaaatgattttatacagctttataatagaatggaattaattgaaattgatagtaggataagagatattttacaaggacaattattagaagtaaaaaaagaattacatgagtataagcttactaaacaagtgaacacaatgtattataacttaaatagagaaaaagtaaatatttttaataaaaaagtataaagttatgtaccatcttgtccgattatataaatgaagaattaataaaaaagattaaaagtagaaatgacaaggatgtcaactatactaaggagggtaaaataatgagagttaatacaaatgtaagtgctttgatagcaaataaccaaatgggaagaaacgtaaatgcacaaagtaagtctatggagaagttatcttctggtgttagaattaagagagctgctgatgatgctgctgggcttgctatatctgagaaaatgagagctcaaataaaaggtttagaccaagcaggaagaaacgttcaagatggtatatctgttgtacaaacagcagaaggtgcattagaagaaactggtaatatactacaaagaatgagaactttatcagtacaatcttcaaatgaaactaatactgctgaagaaagacaaaagatagctgatgagttgttacaattaaaggatgaagttgaaagaatatcaagctcaattgagtttaatggtaagaaattacttgatggaagttctacagaaataagattacaagttggagctaattttggaacaaatgttgcaggaacaactaacaacaacaatgaaataaaagttgctctagtaaatacttcaagtataatgagtaaagcaggtataacaagttctacaatagcaagcttaaatgcagatggaacttctggaacagatgcagctaaacaaatggtgtctagcttagatgtagctcttaaagaattaaatacatcaagagcaaaattaggggcacaacaaaatagactagaatcaactcaaaacaacttaaataatactatagaaaatgttacagcagctgaatcaagaataagagatacagatgttgcttcagaaatggttaacttatctaaaatgaatatattagttcaagcatcacagtcaatgcttgctcaagctaatcagcaaccacaaggagttttacaattattaggataaaataattttgtatattggatatagaagaaagggtaaggctttgctttactcctttctttttttacaaatatacttttgaaaggaaaatatatatgttacttagtatagttatgattgttaaaaatgaagaaaaaatacttgaaaaaactttaaaatcattaaccacattaagaagttctatagagagtgaacttataatagttgatacaggttctacagatgatactataaatatatctaggaaatacacggaaaatgtgtactttcataattggaataatgatttttctagtatgagaaatatatcaatatcctatgctaaaggtgaatggttacttatattagatgcagatgaaatactaattgattcttcaactattgtgaaattttttaaagatggtcttgataaaaaatttaattcggcctcaatacaattaaaaaatctttactcatatgataaaaaattatatggatattgctcagtgcttagactttttaaaaacatcgattttagataccatggtaaagtacatgaacaaccaatatacaaaaaccctatatttaataatgttgctgattttgaacattatggatatttgtttgaagatgaagaaataagattaaataaagtaaaaagaaatgaaaaactgttatttgaagaattaaaagagaatgataattctccatatacaaattatcaattagggaaaaattttattatattaggaaaatatcatgaggctttatactatcttgagaaatcttatgaattatattctaaactagaatcggcacctggttacttgataacaagtcttgtaaaaacatatttatatttaggaaagcataagaagtgtgaaaaattgtgtctaaagtatattaagaaagacatgaataatattgatatatattattatattgcacaagcacaagtagatttagggaagtatgaaaatagtatagattcgtataagagatatatttatttgttagataattatgaaataagtacacaagcaaatagtttattttcagacactgatactgtagggcttagggatgaagctattattacactgataaagatttattataaacttgaaaaatatgagtctgtaatttcagagtacaataacattgaggatatggaaaagaagaagaatgtgtactttagcttatttatgtccctatacaaattgaacagatttgaagatataaaaaactattataaagaagtttcaaattctaaaattgaaaaaaatagtttttataaaaatatagaagaagttataaataatattaaagatgatgaaaaagagcatgtatataaaatcctttgtgacattgaaggtaattatggcattttaaatcagataaggataaataaatgtgtatctatagataagtgtaaagaaatactcaatgaagaaaaagaaataatttatgcatatattataaaagtagcttttgaagataagattgatttactagatattttttatgaaatggaatatgtatggatagagaaatacctaaaatatcttttagcactagaaagaagttttaatttagtactatataagtacataattagtcgtccgaatacatcagatataaaaaagataagagtatataaagctatatctaaagtagttttagaaagtataagtttaagtgatgaaaaatataaggagattttttatctttatataatgtattcttataagtacataagatacatatatagaaatttaagcgattttgaattaataaaatttgtttgcaatgatttagataagtttactatagaatttaagcatctacttgacattaaaaataaagtaaatgatgctaatgaaaaattagagtatatacatagtatgaggaaattactaaatgagtatcctttttataataaaataataaaaatacttataagtgaattagaagaaaatataaaagaaagtgaagaatttaaggatttaaaagatagttttattattagtatagaaaatatgattgaaactggcaaaataaatgatgcgaaatcattggtagatgactattcaaaaacatttatggatgatgtaaaaattttaaatataaagggaattttatatatgtttgaaaataagcttgataaagctgattttatgttaaaaaaggcattatcattagatgtagaaaatgaagatactatatataatatagaatacttaaaaagtttaagataagtcaaaaatgggagaattgaagaatgaatacaccaatagtggttaatgaaaaatctaaagatataataaaagattggcaatatacgtatacaaacgaagatataaaatttacaagcataataatattgacatataatcaaatagaatatactaaattatgtattgaaagtattaggaagtttaccccaaagaataaatatgaaataataataattgacaataactcttctgatggaacagttgagtggttaaagggacaatctgacataaaatctgtatataataacaaaaacctaggatttccaaaaggatgcaatcaaggtattgagttggctactggtgaaaacatattgttgttaaataatgatgtaatagttactccaaattggctttataatttgaataaagctttatggtctcaagataatataggtgctgtaggtcctattacaaatgcatgttcgtactatcaacaaattgatgttgattataaatcaattgaggatatgtttatgtttgcacacaaaataaatacatctaatattaacctatggaaatatagattaaagttagttggattttgcatgttaataaaaaaatctgtgctggataatgtaggggttttagatgaattattcacacctggaaattttgaagatgatgatttatcttttaggatgctagagtcaggatataagctattattatgccaggatacttttatacaccattttggaagtgtatcttttaaagaaaatcgtaataaatatacagatataatgtatattaatagaagaaaatttgaaactaagtggggatttaatccagaatatagtggaatgataagaacagatttgatttctaaaatagatgatagtttggaggcaaatattaatgttttagaaataggctgtggtataggggctactcttttagaaataaaaaatatatataaaaatgcatcaatatatggaatagaaattagtgagtcagcaggtaaacttgcaaagtatagtgcagatgtacttatagcagatatagaaaaagtaaagttggattatgaaaaagatttttttgattatataatattgggagatgtacttgaacatttaactgacccatggaagatagtcaatgaactgaaacaatatctaaagaaggatggttgtttgatatctagtataccaaatattatgcatgtttctgttttaagaaaccttgtgttaggtaattttacatatgaagattcaggaattttagacaagactcatttaaggttttttacattaaatgagataacaaaaatgtttaatgatagtaattacataataaatagtgttacagctactagtatgccactttcggaaattgataatagattcattgatacaatgtgtaaggaaagctgtaaagaaatgagacaacagtacgaatcttatcaatatatagtaaaagccactaaaagcatagatactaaaagatattctagtattagtatggttaatttaaaatacgctttaatgagaattgataatgaattagatgtagatagtaatttaagttatatatttgataattataatataactgaaccatgttttgttgatgatattgaatatttagttgatacgtttgtgataaataaagcaactctattaaatagattaggagttgaggcatttaacagaggtttaggagattttagtataaacatgtttatgacagtattagagatggatagagatgatattgattcaatatataatataacaagtgtattatgtgaattagaagaatttgatactgcttacaacttaattaaaaatagtagcaaaaaagtacagagtgaaagtgacatacaagatatactttattttattgaggggaagagatatgaataatgataagatatgttttataacctgtgtaaatgatgaaagactttatgaggaatgtcttgtatatataaatagcctagacattcctaaaaactttagcatagaaacagtagctttaagaggagccgattctattgcctctgcttataataaagctatgagagaaacagattctaagtataaggtatacttacatcaagatgcttttataattaataaaaatttcatatatgacattttagagatatttaaaaaaaatacagatgtaggaatgattggtgtagctggagtaaaagatatacctgtgaatggaatttggtgggattctgataaaaaagcagggaaagtatatgatagccatacaggtaaaatggatatttatgaatttagtaactttgaagaatgttttaatgaagttatggctatagatggattaattatgattactcaatatgatgtattttggagagaggataagtttgatgggtggcatttttatgatttgtcacagagtatggaatttagacaaaataaatacaaagttattgtaccaaaacaaaataagccttggtgtatgcatgattctggagtagcaaatataaataatggatatgatgaatataggataaaatttgtaaaagagtacataaatcttgatttatatagagaaaatttttatgaatttgataagaagaaagcaagtaccatacttaagagtaataagcatgtaatggattgtatgaaagaggagcttacagaacaattaagattaaagaattataaggatgttttagatattgtttctaaaattgctcatttttctgtttttaatcatactggcttgtattcttgtgaaaaatgtgagagagcattgctagaatgtgcaaataatttaccagaaatagaaaatacgaaattatttacaaaaaaagatttaaaaagaagaaaagtattacatgttttaagtgaaggatattcaacaggagggcatacaagactagttaaaaattggattgagattgacaaagattctgttcattcagttgtaactacatggcaatcagatacactgccagactggttattaaaagcaatagatgatagtggtggcgaagttatatctttggatttaatttcagatgattatttaaaaagagctgtagctttgaggaaaatagcttatgactgggctgatatagttattttatatgttcatatgtgggatacaatacctgttgttgcttttggagttgatgggaaaatacctattttacatgttaatcactatgatagtactttttggttagggacaagtattgcagatattgtcattgattttagcgaagctagtcaattaattacattagataaaagaggcatagataaatctgaaatattaccaatgccattaaaagaaaaagaagtattttcaaaatctgaagttagaaaacgatataatttggaggatgatgtgacaataatattgactattgctagtgaaagaaaatacaatagtgtaaatgatattaattactttaaaattgctaaaacattgattgaaaatacagataatacaattattattgttgtaggagttgatacagagaatctctattggaaaactttaagtaacgttacagataatagagttatatgttttggaacaacagcaaatatagacgatttttataagatttcggatatatacctagagtctttcatggtagggagtcatacttcaaaattagatgcaattttatatgatttaattcctgttaagtttaaaaatgaagtttcaccaatttttacaaatatgtggaattttatagataagtttgattataagaatataaaagaggttatagacatgataagaaggtacaatactagtgaatttgacagggataagataaaagaaaaacaatcagaaataaaacattttgttatagataaacactgtattgaaataaaaaactatatagacaaaatatataaagaggctaatcatcataaagttaagtatgatttatataaaaatgatgaaatcgaagactatcagctttttgttgcattatatggttatatggtaaaaaataaaaacatgtcataggtgataaaatgaacaatattcatatcaataaatttgaaaaaagctgtgaaaaaaactgggattattttgtagaaaataaatctataaatggtacatttctgcaaactagaaatttccttaattatcatgaagaaggaaaattcactgaccactcattaataatatataaaggtgaagaaatactagcagtcgtacctgcatgtgaaacttatgaaaatggtgaaagagtatttttttctcatttaggaagcacttttggaggtattataataagaagtggttttaatgatattaggcatgtaaatgctattacaaataagttagaaacatatttacaggaacaaagtttcaataaagtatatttaaaaaatacatcaagaatattttgtaaagaggatacttcattactagaatattttctatttaagaataattacatgttttatgatgaattaagtatgtttttagaattaagtaagtataaaaaagatatattagctaattttagatatagtaaaagaagatattttaaatattctttgaagaataatcttacctttaaaagattgtatagtgatgaggatatagtttgtttttttaatttactttctaattgtttagatagtaaaggagctaaagtaatacattcagtagaagaacttttggagtttaaaaataatagattaaaagatattgtagaattttatgcagtatatattgatgacattatgatttgtgggagcatggtatttaactttcaagaaagagtttatcatactcaatatctagcatcaaattcgacatataataaatattatccaatgatatttttatactataatctaataaaagatgctttagagagaaattttaagtatctttcttttggaattagcactctaaatagaggcaaatacttagacgagggtttagctacatttaaagaaggttttggttcaagtgcaatttgcaacagaacatactataaaaatataaataagtgataatcatgttttatagagtttttagagtatagtaaatatctagtactctaatattacataaaaataattagtttataaagaaggtttgtatatgaaaagattaatgattttaggctcaattaagtattttgagaatattgttatgtcagctaaaaaagagggaatatacacaattgtttgtgataatagaattgatactcctgcgaaaaagatttgtgatgaagcaatagatgttgatgtatttgattttgataaaataaaaagtatagctatagataaaaagatagatggaattttaactggatttacagattctttaatgaaaccatatgtttatattgcaaatgaactaaatttaccatgtgtgatttcttgcaatcaacttgaatctgtaactaataaggctattatgaaaaaatattttaaaaataatgcaatacctacaactgattattgtattattgaaagtctaaaagatttagaaaaaatacaaggattaaattttccacttgtaataaaacctgttgatggttatggttcaagaggtgtatattttgtatcaaatatagaagaattaatagaaaaatttgaatattctaaggaagcctcacaagatggacaagtaataattgaggaattttatgaaagtgaggaaatacaaggactagcttgggttcataatggagagtcacatgtattttatattggagatagagagcttgtaaatatacatacaggaagagctggaaaaccagatagattactttatccatcaaagtattgttttcaatatgaggaagaaataaaatctatatatcaaaatataacacaggcttttgatataaaaaatggacctctttatgtacaaatgttagtgggagcatatggaataaaggtatctgaagtaatgccaagattacctggaggttgtgactatatggctatttctcaaataacagatttagacataggaagtttatttgcaaactttagtgtgaataatgaagtaaattttgatgaaataaagaaatataatatgcatttatcaaaatgtgtatatgcattaccaatatacataagacctggaacaataaaaaagataaataatatagataaaatagaaaacttagattatgtcactcaatttctattattagtaaaagaaggagatacaataggattatatgaggatgagagacaggattgtggaagagtttatggaatagcaaataatatatttgatgcaaatataaagaagaaatgtattcatgaaatgatagaaatatttgatgaaaataatgaaaatatgatagaaaatttttaaataagggagtatgatagatatgaagctaataactcatgaacaaattatgtcattaaacatttctcagaaacaaggatatgaatggataaaagaatcttttttaacaaaaaaagattgtcaattaccaccaaaaataagcatggtagaagaaggtcatgtattttacaatgtaatgccgtccttaaatcataaccatatgattggtggaataaaaatggttacaagattgccagggagaaatccaagtttaaattcagatatatttctatacaatatgaaagatgctaaattaaaggctattttggatggtaattatattacagcttttagaactgctgctgttgctggtttggctattgatacttttgctaaaaaagattttaatactatttctattatgggtttaggtgtaactgcttctgctataatgaatatgctttcgtatactcttaaagataaaaatataaatataaagttacttaaatataaagaccaagcagagtcatttataaaaaagtatgaaaaaaatgaacaatttagttttgaaatatgtgatacacatgaagaacttattgtagattcagatgtagttatttctactgtgacatatacagatgaatatttatcagaatttaaatggtttaaaaaaggtgctttattattacctgtacatgttatgggatttggaaatgttgattatctatttgataaagtatatttagatgattataatcatttgaaacatctagaaaatatagatagatataaatattcttgtgaattttataatgttttaagtaaacaagctaaaggaagagaaaatgatgatgagagaataatatcttacaatataggtttgtcaatacatgatatattatttgcaaacaaaatttacgaattgtgtgaaacactaaattgtgaagagatagaattaaaagaaccaaaagaaaaatattggatatagtttatttcattcatatttacaataatttattgtaaatatgaatatgaagtaatatattgttagaaaattagcatgaataggatagataaatttatggataaatataatttaattaagttcttatctattggaaacgaatatataggaaatttagttgcattagaatcaaataaagcaataccttttgatataaagagagtttattacatatatgatgtaccaaacaatgtaaagagaggatttcatgcacacaaaaacttggaacaagtactagtttgcctaaatggaagtgtgaagataaaatgttatgatggtgtaaaagagagtatatttaatttacataaaaatgatgttggattgtatataggaacgggagtgtggcatgagatgtttgactttgatgaaaaaactgttttaatttctatagcatctgaacattacaatgaagaagattatattagagactataaagaatttttaaagtatttaaataatatgtagttattatacagttagtgatgtattttcttaattaaataaatttaagatagccatatagagaataaatagattaggatgtgaatttattgttggttaaatttaataatttattaaaacagttccaaactcataaagaagaatatgaacagaagattaaggatgtaatggaaagtggatattatatccttggaaatgaagtaaggcattttgaagaagaatttgctagctatgtaggtagcaaatattgtgttggtttagccagtggtttagatgcacttataattgcttttagagcattaggaataagtgaaggtgatgaagtaatcgtgcaatcaaatacatatattgctagtgttatgggaatcagcataaatggagcaacaccagtatttgtagaaccaaatgaatattataatatagattcatctaagatagaagaaaagataaatagcaaaacaaaagctatattagtagttcatttatatggtcaagcaagtaaaatgaaagatatacaagaattatgtgataagtataacttgtatttaattgaagattgtgctcaatctcatggagctaaatatgatggaaaaatgacaggaacatttggtgatataggttgttttagtttttatccaagtaaaaatttgggtgcatttggagatgcaggagctatagtaactagtaatgaggaaatagctgataaagtgaaaattcttagaaactatggttcagaaaagcgatattataataaatttgtcggatataattcaagattggacgaaattcaggcaggtttattaagagtaaaacttaaatatctaaatgaaattgaaattgaaaaatcaaaaatcgtagatagatatcttaatgaaattaataatcccaaagtcatacttccaaagatagaaaataattgtactcatgtatggcacttatttgttttacaagttgaaaaacgagatacatttatggaatacttaaagaaaaatggtatagagtctataatacattatccgataccaccacatctatctgaagcatatgcttatttgggatataaaaaggggagttttaatatagctgagaactattcagataaagttgttagtatacctttatttgtcggtatggaagatgaagaagttagttatataattaaaattataaatgaatattaaactaatcataataatatcaaaaataaattttctatatatcatttatttaaatttcgttaattgacatttttaaatattgatatattgtacaaataaaattgaaatatatggaagaatatagaataaagatgagatttgtctaatatttttataaattaaaaatattttcaaagagtttattataaaattgtagactatagtgtttataatctttgtaattattggtaactaaatttaaaaaataaaatatttaattatacacaaaaaagatatttaaaaaatttgttatttattgtatacttaagttaaaactaaataggcaaatctagagaaatctagtgacgcaaagctataggggctaaggtttgtatacacaaactatgtcagccagttgccaaaaagagttctaggtatattgtatacgtaggaagagtctaggatgactgcctttttggtggtcattttgttatggaaaaaatcacattatgtagtaaaaaacacctataataacatattataccaaatataatttaaaataaagataaattatctataaaagttactattccttaaaaatatttcgtcaatacttttttaaattattttttaaaaatatttactttcttatattacataatttattgaatgacagtcatactgttggtttagagtattttaacacacacattttgttgtaaaaattataactattaatataatatatatacaatcataagtattataatttttatgaatctaatttaaacttaatatagacttattaataaaccttctatgtctaaattttaaaattacaatataaaagctctacactaaataaatacattaaataaacacaatggataatgaatataaatttatatatgcaaagcgctccaataaaaaggtaccaataaagttaaaagaaacttattgatacctttcattattacatacttcaatatataattataagttttttaaatagtatggatttacatttatcccttatctcatagctctcatagcatttactactgctataagtgccacacctacatcagcaaatatagcttcccacatagtagctactcctccagcacctagtatcataactataatttttactcctagagcaaatattatgttttgccacactatcttattagtcttgtttgctatttcaattgctttagatatcttgctaggctcatctgtcataagcactacatctgcagcttcaatagcagcatctgaacctaagcctcccatagctataccaacatcagcacgagctaatactggagcatcatttattccatcacctacaaatgctattttctctttttcagttcttccttcatataaatcttctaatctatctaccttttcattaggaagtaaatttgagtaaactgtatccaattctaattcttgagcaatattttttgctactttctcattatctccagttaacattacaacttcttttacccctattgcttttaagcttcttatggcatttttactatcttcttttacttcatcagatataactatataacctctatatactttatcaacagcaatatagactactgtgcctacttctttagctgatgaataagatatattttcttttttcataagtttctcattacctgctaatataaaattgccattatgctttactctaattccataagctgctatttcctcataactgtctattgtatctaaatcaatttttttattatagtaacttaatatagactttgctattggatgatttgaatttacctccgcaatagctgcatattctaataattcttcttctgatataccttcaggatttaacttagttacattgaacacacctttagtaagtgttcctgttttatcaaatactactgtatctacacttcttaaagcttctaaatagttacttcctttaataaggataccatttttagatgcaaacccaattccactaaagaaactaagtggtattgataaaactaatgcacaagggcaagaaacgactaagaatatcaatcctctatataaccaatcactaaatacctcacctgagattacaagtggtggcacaaatgctattaataaagcagctattactactattggagtatagtatcttgaaaacttagatataaagttttctgtctttgattttttaatgctagaattttcaacaaggtcaagaatcttagaaactgttgattctccaaaactctttgtaacttcaatactcaataaagcatttttatttataacacctgataagatttcatctcctttttcaacttctctcagcactgactctcctgtgagtgcagaagtatctagcatagaaactccatccactactacaccatctaatggtactttttcaccaggttttactactattatatcccctacatttacttcttctggtgacactaccttaacttcagaattaaattttagatttgcataatctggtcttatttgcataagtgaagttatagactttctggatttaccaactgcaacaccttgtaaatactctcctactttatagaaaagcataacccctactgcttctgatgactcccctattgttaatgctcctactgttgctagagccatcaaaaagttctcatcaaatactcttccttttgatatatttcttattgctcttaaaagcacatcgccacctactattacataggcaactataaatactatattgctaaactgactttcataacctgtagctgtttgatatataccaaatatatatacaagtgctccaattataagtggaactaattctttcttatttgtatcatttacagctcctgatttttcagtagttctcccttttactttgtcagtagaccctacttgtatatcaagtcctggctctgttgaatttattatttcttttattttatttataacatcatcctctttaaagttattacttatatttactgtaagttttttatttacaaagtttaaattagaagattcaacttcttttaatttagaaaccttgttattaatctcctctgcacaatgtgcacagtttaatcctcctaatataagctcttttttaattgatgttttactagatgcattttctttagaacttatttgtatatcaagacctggttctgttgaatctattatatctattatcttttctatagtagtatcctcattaaagctttcctttatatttactataagttttttatttataaaatttaagttggaagatttaacttcttgtagtttagaaactttattattaatctcctctgcacaatgtgcacagtttaatcctcctagtataaattcttttttaattaaattatttgcttccatatatattcactcctctcatttatcatttataagtttctctaatatgatttaatccacaatcaaatatctggcttatatgactatcatctaatgagtaatacactgtttttccttctcttctaaactttactaatctagcctgctttagtactctaagttgatgagatattgcagagtgagtcatatttaataaactcgctatatcacatacacacatttcatttgcaaataatgcatataatatctttactctagtagtatccccaaatactttaaataattctgctaaatcatataacatctcttcatctggcatagttgatttagcctctgttactatttcttcatgtactatattacaattacaatcatttatctcttctctcatctttaatcctccattgttttaatatatgaataactgttcatatgttcattatatgctatcattcctaaatttgcaacaataatttttattaatttaatataattagaatgcacatattataaacttttttaatatatatattattagaataagtttttgtaaacttttttatagttttctaggaggtgcaagtttaatatgagtaacaagaaaaaaaaggatttagatactagttacatgccttacttagacccagcgaactatgcagattatattactaatgaagaaattccccaagatgaattgagaaatgaccctcaaatttctaatggttatacaaaaatacctaataaccagaacataaataacctatatcctaataatgtaaatcattatcctaaaagtagtaattctccaaacaacttgcctaacacaaataatacatccggaaatatgaattacaatacatctgctacaaataatatgcctaataacatgaataataatacgggtatgcctaataatatgtctaacaatatgaatagtaatatgggtatgcctaacaatatgcctaataacatgaatagtaacatgggtatgcctaacaatatgtctaacaatatgaatagtaatatgggtatgcctaacaatatgcctaataacatgaatagtaacatgggtatgcctaacaatatgcctaataatatgaatagtaacatgggtatgcctaacaatatgcctaataatatgaatagtaacatgggtatgcctaacaatgtgcctaataacatgaacagtaatatggggtataatatgaataatactatgggtattcctaacttctcatgtaatcaaaatatgcctcctaatgtacttatgatgataccaggagttatatgtcataatacaatgcaaggtatgcctgtagttatgcctagtactatgcctcctaatatatatcctactccttatggttctagtaatatgtctatacaaggtataccacaggctactaatattgaagaatttgatgaggaagaaatgtaatatatatttttttgagcaagttgtataaaacattaataattgaccataataataaatgtattcctcataatattcccccaatattattataggtatagaaagttgactgagtatgcgcttattcggtcaacagatattaacataatctaataagataaacatagaaaaagtcagataaaatttaattttatctgactttttcatttaaaaaactctttcttgtgttggtgggtcagaatagtatggtactcgtatttgagactaatattggcaaacaacataaagaaaagtataaattttttataataaactgtataaaattttaataattgaccacaataataaatgtattcctcataatattcccccaatattatagaaataaatttaagcgagattaaattcagttaatctcgcttaaataatgtctaaatttattattccaaaaaatcatcaaaatctaatgaacctgattctgcaaagtcatataatgcattttgctcaaagaaaaatttctcttcaaatttaatatagtcactataattagactgacttatttcattgatataattgcaatcattttcgttataagtaccaataaaaaacttatttcccattaagtaatatatagctttcatatcattgtttattatatatacattttcttttacatggtcattattaaaattaaatctagtaaaaaatataccttcattcatattactttttaacagaaatggattttctctataaaatactcctgcaaattcttcaggtgaatttacactgtaaacacttacaaattcacttttagaaatctcatcaaatacctcaaaatcatacataagttctttatctgtcactaatagagaattaattctaaaaccagtttcatagcacttacttatgcaaaaagcaattttacatatataatatccatcattgtcttcatataaagcttcacttatatatctgccttgacctttatcacttaccacgtttttaagtaatgttccatttatattagtaatatgcatatttgcaatctcgtcacttccagaaaaatattttaaactttctctatcccatgctataaatctcatagtcatatagtttataaattcaacttcctcatcaactcttttacatattttattgtataatttttctataattaaatctgttttatagttttttataatatcaatatactcacatttatctcctggcaatagcttatcataataaagattcttattaccaaaataagatactaaaaataaagattcatccttcgttaattcaactctatctgaaccaaatcctcccatcaatctttcttcttccatataagcttcttcttgtgttgggttatttaaactcacataatctgctaatcctaatccctctgcatctaataaaaaatattgacaaaagtgattgttttcatcatctatccaatttattataagacctaaactgcccataagtctagaatttgtagcctttgcaaaattaaaattcatatagtcacatcctttaaactctaaaatacttgttttttaatatataaattattatacatatattttaacaacttagatacaatttataatataatataaggaaatgattaattgaggtggtcttatgaaaaatatagcagctttttttgatatagatggtactctttatagagactctcttatggttgaacattttaaaaaattaattaaatacgatataattgaccaaaaaaattggtataaacatgctagagacacttttatggattgggataaaagacaaggtaattatgatgattatctattagaaatatgtgacctttatgttgattcactaaaaggattagataaaacctgtatcaactttacaagtgaccaagtaattaaattaaaagcagatagagtttataaatacacacgttcaaggattgagtggcatctaaatcaaggacacatagttatatttatatctggtagccctggatttcttgttgaaaaaatggcaaaaaaatataatgtaaccgattttctaggaagtgattatgtctttgaaaataatatatttacaggcacagttattccaatgtgggattctataagtaagaataatgctataaatgattttgttgtaaagtatgatttagatttatcaaactcgtatgcctatggagatactaatggtgatataaatatgctaaaaagagttggaaatccaatagcaataaatccaacaaaggaacttttatctcaaatatcacttgatgaggaaatttctaaaaatgttgagataatagtagaaagaaaagatattatttattctctatctacagatgtaaatatagtggatatttaatttatactatctattttaaaaacttatattatatctaatatttatatctaacatataaaagctttgactaaaaatcaaagcttttatatgttgcactaagaatatattaaatttagctttatgctttaatgtatattcagatatatcatttacacttatccaaactacaatttcattaaaattaaatataaaaatcaactattattttttaaatagcatctttcttaacctattattgtaataacctataaaagaactgtaaacatagtcatatactataaaggctatctcaaatgaacctataataaatatgtttattggaatataaactattgttcttaataaaaaatacaatataagtatcattatatttgcaaatactaatttcataaaatactcaatatatatagacctatctttttctataagatattttacaataccatatattccaaaggtaagtgaatatacaatccattgagacttacttgccatcactataaatcctaaaactatagaacctatataaaaagcgattccactcttaaagccccattccattattacaattgatactaaaagtgatgctaaccccataataaacaatgtatttacaggaataatatttgtaagagtcaacaatatcacatttaatgctaataaaactcctccataagcaacttttatactcatatttatcatcctaacaacaagttattaaatctccaccaaaacattcacaacatgaatctaaacaccaaagcttagcacaattttcacaacaatcgtcacctagacaacaacagcaatcatcacagcaacagcaacaacatccatctaaatcattacgtcttcttctattataattgtcagccctattgctataatcatttctatattgtgtataacttctaagtgcatcactatattcactattttcaggctccataaattttgctctttttaagaagtcttcaccttcttcataatatcctatgttcattgcagaaaagccagttaaataataccactctgcacatttgtcagtcaaagtttttaaaaaatcatatgcttttttaaattcactattttctatgaatgctcttgctctcataaaattttcattattataagtattactgtacattctttccacctctactttctaatatattaatatatcttaaataaacaccagaataaattatattttctattattccaacatttttatttagatttagattatcaattcccctagctaaaaatcctaatgatgttactattattttttttactttttcttttaactcatcatttttatcaatatactctataaatggattatatcttcctttcttaaaatcttcatctaaatcttcataggcatctagtagatatatatacttacctatattaaaacctatcattcttaagtttctctcattttcatcttttttatagacaaatacttcacccattatatttccaaatatactagatacttcatctatatttatatttttatctttttctaacttatttaattcatttagttgttgttttatatactctgctttttcaggatacttttcatatgctaattttaatttgtttttatatatataatatgccaatttatcttttatgcgtttatcatccattaaattatcttccaatttataatacgttaaaagaatattcatacttgctgcatattctgtaatatcatttgtaattacctttttctttttaaatggatttactatacacacttcctctgtacttatagactctgggttatatactgctgttaataaaacaattaaaaatgttatatcataattcaaagaaaacctagagatttctccatgatttctttttaagtatttacatagtccacaatagtaagctttgtaataatcatattctctaaatgttaaatccattttgtttattttaacatatccaaacataaatactcctttttgtactactttattatataaattatatttattttctaactcatttattttatagtgcattatgtaagtttttacgctttttacttactgatgctatatagttcttttgacttactacatattatctctaagttacttatatcatttaatagtatattctttgcctttgaacaagtcattttttatcccttattacttaaggttcaatcaagatttaacaagctatgtatttacattttttgtaagtctaacataattaatatattaaaaagatgtatttatcctatatgtttatgtgttgattagactttagtaaccttaattgaatctattgttttattggttagaaaatgagtgtatgccatcaaacattaactcgttcctcttttattttttgttaattattattatatcattaataaaattataattcatttattttatatgtaatcattaataaattcttgtctacttctcttttcttttttaagtcttctatattcgcctaagaatgttctgttaggtatagtgacttaattccaatctcatctattgttatacttacatctttattttgctataagctatcatttattacctatttcttcttattttttctattttagtggacatttaatttatgacaaataaatatatttatttgattatatttaatacaaaaatattcttataacctttttaaatcatatttaacatataatattaagtaacatacttacttaagaggaattattaaatgataaaaattgaaaatttaaatattattaacaataaagatatgaaagaaatactagatacacgggaatcatcagtaagagcaacacatgactttttaagtgaagaaaatataatatcaataaagcctcaagttaaagaatgtgctaaatatgttagtaattttttatgtgtaagagacaaaaaaaggtattataaaagcttttatgggaatacatgattttaaaattgaaatgttatttgtaagtaattatagtataggaaatggaattggaaaaagacttgtagaatatgcaatagaagtattaaatgtaaattatgtagatgtgaatgagcaaaatcaacaagcattaggcttttataaacatatgggatttaaagtctttaaaaaatctgagttcgatgaacaaggtaatccattccctatactgcatatgaaaataaaataacaatataaactatagtataactaaataaatataaatagagtaataattgaaaaatattactctattatcataaccttactctcacttatcttgttataataattatataatatatttttaggtcgtttaaactgtatttttagtttttaaataacaaatattttctattgttgatttccaatgattttatacaaaaatagtataattgttatatgttactattgaagttttatttatttttcttactgtctaatactactccaataactaatccaaaggataaaccaatagctaagtttttaaataatgaacccaaaacaacaccaaaacataatcctaacgccaaataacttatattttcatttttcatatattactcctttaaatttaattgcaatattttaacttttctaattgattcttttgaagttttgactatatcaactaaacctcttatctcatagttattacactcacttagcactccttttactaatattttaagatatctcccctaatttataaacagtagtagtaaaaaatggtttttaaacatatattttcaaagtctaatatatataaaactatttttatgaatctttacgaattcccactgctcttaacggaccgagtaacgacattctagcaagtatcagtgccatttcttcaggggactctttcatatttttttcaagccaatattgaattacacctaagtctgctgaaagtatatattgtataaaatattcttctgaaattattgcctcatctatgttaaaatttattagtttttgtttctcaaacaaattggtttcaataaatttttttatttttctttcaaaagtagggtcacctttgggacccaagatagatttaataattactgaattttttctaaaatattcaaaaagctttaccataaatggaagaggttcacttgaggtatctatctccatcatgttggatgaatcaagatgtttggtctcctcttcaatttcctgtattatttcattttcaatcctctctaacaagtcatacttatcaacataatgcagatagaaggttcctctatttatatctgccctttgagttaaatcagtaactgatatattgttaaatcctttctcatctattaactctgctaatgcagacctaatcatttttttagtacgtatagttcttctatcaatagatacttttttcatgaattatttcctcattccatataaatttttttaattttaattaacaattttatagtaaatgtttattacttaacagtttaaatattattgtttattgcataatgcaatataaatattataatatacatatagattattaatcaacattgtgttcatagaaatagcgacttaatttgaaggaaatgtttaatatgaccgaaaagttcgcctttatatggatgcattatagaacatcttaagaatactattagtggaggataaaaatgaacaatttagataaaaacaatgttaatgaagttttggatatgctattaagaactagaagatccataagaagttttacaaaagaagtaccttcaaaagggctgattgaagaaataattgaaactggaagacttgcaccttatgcaatactttcagtagcaaaacaaacagatttcagacatttctttgttatttcaaataacagtttacaaatgaataaaataaaaaccattcttgttgatgttattaaaactcaaatatcagtcaatgagaagaaggcaaagaacaacattacccttcaatccttcattacttccttaaaaatgcaagttgaaaaaggggttcttggtataggaacagcaccttatcttattattgtggcagaacgtcgtggaataccacctatagaacaaaagtcattatctcatgtgatgcagaatatgtggcttaaatcaactgctttaggattaggttttgaacttgttagtgtaataggaagattgagcgataataaagatttttgtgatattttaggagtaccaacaggtgaatatggatttgatgcctgtgcaattggtttccctactacatctgtaactagggaaggcagagccattcctcatccatcgataaaatggatataataaacaacatcgaaaataaaatatttataaactattcttacatgtttttaataataagttaaatgttatttttcagggtaatctataacctaactaaacctaaaaaataaaattaattataaacaaaaaataaatataataaaagggcttacaaattataagtccttttatcaaacataaaatcaaattattttccttaaataggaaactttaaaaatatattctaattattgtatcttagattgaaaataattagaaagttaagttaaaaataatattaatttatatattcatcctaattcatacaattcaatcttacttgtattaaattactcttcaaataattggagtatattcaaaactacctacagtatccttcaattctttttttgctttatttataaccaattcatcaagcattacatcatttattgaacatgatatagatttagatgccaataacattgccttaaatcccatatcagaacctgcactggcacaagattgccatgtatgggcagaaataccaataggccaaactgaacaagaacattgtgctgtaggaattatgtagctaacatctccaatatccaatgataatgatatacagttattatgagtaaatgtatcatctgtaacctcatcatgtaaattcatcttagtaatatccttatttccacttaatacactagaaacactacttcttttatctatagacactgtctcagctaatttatctgcaaaatagtagtcatcttcattatagttttgcacacctactaatttcatattttgtgatagaatatctgttaatattgtatttggaatatagtcatatactccacttataatgtcatattccataatagtaccagtcattaatgctgctccttttgctatatcaacaatcctaccaaatacatctcttacatgctccattttaactcctcttatgtaataccacacttctgcaaaatcaggaactatatttggcatttttccaccattagtagttacatagtgtactctacaattatcaaatatatgttctctcaaataattacaacctatattcataagttctactgcatcaagtgcacttcttccgttataaggagcttgtgctgcatgagcactaatcccattatatctaaatttcacagagtaattagcaagtgttgggattcttatcggagtatttatatcaaatggatgccaactaaaagcacaatcaattccatcaaaaaaacctttttttatcatcaatacttttccagataaatcttcttctgctggacatccatagtattttatagtccctttcagcttttttagtttgattaattcctttactgcaattacagctcctattgaacctgtaccaagtaagttatgtccacatccatgacctgcaccaccatctacaataggttctttagtagtggatactttttgagacaaaccatctaaagcatcatattctcccaaaactgctataactggtctaccttctccataactagccacaaatgctgtatccataccttctaatccctctatactaaaaccatgtttttttaaacattctttttgtaaatttgaagcatagtattctttatactgaagttctggatttttccatatcttatctgatatatctcttaattctccctgtatctcatctatatattccatcaaaaactttttatttaaattatccatattaattatataaacctccctgtttctaataacttatcgattatcagccaaaatgactaattttaactgatttaaaaatattttctaccatacaaccattttatacaataaaacctcttgacttgtaagtttcattttatcaagtaagaggttttcaagttttataaaatttttagcatgttaaccaatcaagcatattaacccataatttattatagtatttccaatcagtaaattcttttggaccccagtgaggtgcacagtcagaactaaagatagcagattttccttttccaaactcgccaacagctacaaatgggtctcctccaatagttgctaaaacaggacaattatctctagctactgttttgttatatcctaaaaactttggccattctgttggtataccttttaatactggatgttcagagtcaataacttctggaattattcctgctggtttttcaactctatcatctttatctatcattgttattggtaatacatctttgatagcagtttctccaaatctagcttttgcatctattcctgtaaatgacatatatccacctaccatgattaacgccccaccattatttacatactctttgattagttcaagtctatctggattactattgcaatctataaaagtactattagataataagaacgtattagaacctatatcagataatattatacagtcatactcatttaactcttctaatttatacggaaaactatctgctgctacatgtgcaggcatatgaactgtctcatatcctccagattctattgcttctttcaaccactttacagcttcttcataatgagttgtaacaaacgtatcaaatccttttatatgagttatattttttacccaagattcccctactattaatacttttttcatttatatattcctcctacttttataagtttaatattagacttgcatacataagtatactatctaaatactccttaatttcaacatattcatcaattgaatgacattgttctattgaacctggccctaatataagtgttggtatttcagctaaatttttcattaatctcgcatcattgccagctgttgaaccttttatctctaatttttttcctaaagtttcttctagtattttatgtgcattcactacaaaatcagaatccttgtccatctgaaaacctaaccctgattgatatatgtttatatttggtttattatctttaagccataaatctccattagcccttgtcattatgacatttgttacatcatttacaacttgttcataactcattatatttggcaagaagtgtacacataaattaaatacacacttatctggcacagtagaacctgctgttccaccatttattacacctaaatttattgtaggtgaaggtaatagtggatgcttatatatcataagccagttatgttccaactcttttatatcttgaagcaacaacatagccttctcaattgcatttacaccctcccacttactaccacagtgaagagacacacctttaacctcaacttcaaagaatacaaatcccatatgtgcaactattaagttttgttctgatggttcacaaattatgcaacaatctccaccaataccattcataactgcatttatggtaccatttccgccaccttcttcatctactactgacattatttttacattaccaggtacatttagaccactatcttttataagctttacagctaatattgatgctataagtccagatttcatatcagcagttccaagaccataaagttttccattatcttctgtagcacgatatggattatatttccacttacttatatcacctggtggcatagtgtctacatgaccattaaatacaattgtcttaccaggtaaatcatcactatacttacaaattaaattatatctatcttgataattgtgacctagatttccttctttatatatattttttgcttttttaattaattcttcgctcatttcttgtctatctacactaaaacctatgtaatttgcaagtttttcaatatattcctgtccttctttttcaaatccacctagtattccatgaccaacatcttcagtctttatacttacaagttcttttaaataatctatgtattcttgttttttactatttaatgtatctaagagaatttttttcatatttcctcctaagatttatttttacatttaaaatttcaagtctaatctcatctatttaagccatagtaaactttttcacttagcatattcccattcaatgtataaagatgtatgcaaattaaagtataaaaatatatacaaaaacttaataatttttatagtttataagctaaaatttaattactatttagatttagctgatttttttaattttatattatttatccatatagcaaataacattaccaaaccttttataatcatttgattatatgaagatacacttaataagtttaatccatttcctaatattcctattattccgacacctatacatgtacctactatagaaccagaaccacccatcatattagtaccaccaagcacaacggctgctatagcatccaattctgctccatctccaacagttggtgaacctgatgccaaacgtgatgatagtattatcccagctaatgctgttagtagtccagctagtgcgtatacttttactataactttatttacttttactccacataatctagcggcctcttcatttccacctactgcatgtacatgacgtccaaaattagttctttttaatagaaaatgtcctgctattacaactataatcataattataactggtattggtattggtccaatatatcctctaccgagcatcttaaatgcatctgtatttactgatataggtcttcctcctgtaaatacaaagcttgccccacttattatcgttaacatggctaaagttacaatgaatggaggtagtttttgtgttgaaataattgcaccttttatgactcctaatattgtccctattgctaatgcaagtatcatacctacccatataggtgcattataattcactactgttgtagcccaaaatgtacctactaaagcaattactgctcctacacttaaatctattcctcctgtaattattacaaatgtcatacctactgcaagtattgcatttattgatatttgtcttccaacattaattaaattatctaaagttaaaaagttagatgaagctacactcattattataaaaattattacaagtcctacagctgcactcccttggtctctaaatacacttgttaattttgtcaataatggagaagatttttcttctttatgcttagttattgaactcattaattttacctccgaaagccaattttaatacattattttcaaccatttcttcaccttctaaaaatccacttatatgaccttctctcataaccattattctgtcactcattgatattaattctggtatttcagaagatatcattattatacttacaccactctccactaaatctcccattagattgtatatctctgccttagcatttacatctatacctctggttggttcatccataatcaatatatctggttgtaataaaagccatcttgctattatagctttttgttggtttccaccacttaaactttgtataacttgattcatatgtggtgtttttatctttaaagcttctatgtatttttctaaaatctctttttccttttttctatctataattgatttaaacttagatatcttttttaacccagccatagttgtgttttctttgacactcatttgtaaaaacaatccagtaccttttctatcttctgttattaatcccagtccattttctattgcatctgatggagttttaaactttacttcttcattgtttaaatatattttcccagaatcatatgttctaagtccaaatatagcttctactatttcacttctcttacttccaactagtccacctattcccaatatttcaccttttcttatattaaagctaatatcattaaaaacattgttcttagttagattttccactcgcataatttcttcttttatttctacttttctttttgggaaaaattggtctagctttctatctatcattaaattaactaattcttcctcagacgatacatctttggtattcaaagtcgaaatcgttttcccatctcgcattatagttattctgtcacaaatctcaaagagttcttccatcctatgggatatatatattatactaactccactctcttttaaatcatttataagtctaaaaagtatttcagtctcttttttacttattgaagaagtaggttcatccattattaatactttagtttctgatgataaaactcttgctatttctaccatttgtttttgagctatactaagctctttgactaaactatttggatttatatctattcccatattatcgaaaatctttttagcctcttcattcatttttttgtcattggttaagactttgccatttatttcttttcccataaaaatattttgtgctactgttaattcgtcaaaaactgttagttcttgatatatggcatttatacctatctttttagagatatctggggatatattctctatttctttgccttcaaaaataaattttccagaagttttcgaatgtgcaccagttaaaatctttatcattgttgatttaccagcaccattttcacccagtagtgcatgaacttcgccatgaaataactcaaaattaacattatctaatgctctgacaccaggaaattctttagcaatattacttaacttcagaattatattactcataatgacactcctttttaaataggatttctttcaaataatctcattttattttactaattcttaaagtcttttatattttccttatcataaagtaaagctggtactggtatattcttttctaccttttccccttttatagcttttactactgcttctacagctaaacgtcccatctctttaggttgttgttgaatcatagcaagaatagttccatctgttattccacttgatgcttcttcagttaagtcaaatcctacaatcttaacatccttattttttgcagattcaagtgcagctttagctcctagtacactattttcagctgttgcatatattatatctacatctggattagattgaattaagttttctactgtattaagagattcttctctgtcatatcctggttgtgaatttaatatcttaacatttgctgaaccttttaacgcatctttaaatccatctattctctgcatttgtatttgagattttaaatctgtcactattgctatttctgactttccacctaacttttcatctatgtattttttagtgtattcccctaattttttaccagcatcataactaactgttcctacataacttgtaatattttcagtatttaatacagcatctactgtaactactggcattttttcaaatgctccttctactgctggtactatagccgaattatcagttccaagtactatcattccatctacattttgttgtataaaatcttctattgctgatgtttgcttagctacatcttggtctgggtcatttactataactttcacacctaattccttagctttttcttttattccctcatcaatatctataaaaaattgatgttgaagagttattgtagatactccaatagttaaatctttcttgtctgaaccacctttattatctgatttacttggtccttccattgaacaccctgttaacattcctattgctagtattccagcaattcctaaagataaaatttttctcactctcataattaacctccatttttaatagttttaaatttgaacaaattagatttttatttattatttaaatatttttcaacatcttctttataaggcataccagattgtgcacctagtttagttacagaaagacctgatactactactgcatattctactgctgtatataattttttcccttctgttatagccactgccaatgctccattaaatgtatctcctgctcctgtggtatcttgaacatcaacacttatacaagatacatgcttgatttcctcaccatcataaaatctagctccattttttccttctgttattacaagtttatttggatatttttttaatacttcttctatcccttcatttgtgtcaaaaactatcttatattcatgttcatttggtgttaagtaagttactttttctattatatcttcatttagttttactgctggtgctggatttaataaaaccttaatcctattttcaaaacagaaattcactacataatttattgtttttaatggaatctctaattgtagcaatactatatctgcattctttatctcttcttcattctttttaattaattctatatctactagctcattcgtccctggtacaacaacaatactattatcattttcacataatgttataacagcaacaccagaacttttgtgattatttctggatactaaactataatcaactttattcgttctaaaatttcttattaactcctctcctaagccatcttcccctatgcatgatatcatttttacatttgctcctagtttagaagctgagatagcttgattagcccctttccctccaggtgatgtaaaaaaactattacctaatactgtttctcctttttctggtcttttatctacagaacataccatgtccatgtttacacttcctatgacaactatgtttcccattacattactcctttacatatctatttatgtctctcgtgctgttattcactttcttttgttgaatctcttatgactaattctggtttgaaaatcaattcatcaaatgattcttttttatctcctcttaaacaatttatcaatatttcactggctttatatcctatatcataagacggctgttttactgtggtaagagaagggcttattagacttgatgtttgaatatcatcaaatcccacgacacttacatcatttggtatacttaaccctctttctttaagacctcttatgacacctattgcaatcaaatcatttgcacaaaatattgcatcaaaatctatcttttctaaattttttataaattcttgtccccattcaatcttatattttccttcaaatacataagcagaattgtagcttaaattacactcgattagagcctttttatatccttctaatctatctactgctatttcattttgaagtggaccacttaggtatattattttcttatttccaatatctaataaatgttttgtagctatataggccccttcaaagttatttattttaacaattccttttaaggtttctttgttcatacttatcttcttatcaatcaagacagttggtatttttatatctttataatttgcttctttccagtttgtatttgaagatgctgcaaatataattccatctatcatcctctctgatagtgttcttattccttcatattcttttttagcatcttcatctgtattacataaaattatattgtagccttcttcattagctttgtcttctacacctcttgatacatctgtaaagaatggatttcgtatatctggtataagaagccctatagtattagtttttttagttactaaactttgtgctaatttatttggtacataatttttttccttcattattttcaaaattttttctcttgttgcctgacttatattttcatctttattattaatgacttttgacacagttgttttagaaacaccagccaattcgccaatttcttttatagttatactcaagaagttcacccccaaaatttaggaaaccgttttacttaaccggttacctagatactatcacatccttttcccatttgcaaccattttatataaattttgatatttttcccttttttcaaaatattgcaacttataattcaattttaatatttaaattaatctgcaaaaaaaattaatatacttttataattatctaaaagtatattaattaatttaagtagtatttattaaagttcaaatccttgctctataatcatttttttatcattttcaatcccacttccaacagttgtcaaataatcaccaacaattgcagaatttactcccccattaaatccaactttgtcatatccctttaatgatagccttccaccagcataccttatgtacacattaggaattataaacctaaatactgctgttgtttttagtatttccattggttctaatacatcataattttccattggcgtattcttaataggatttaaaatgtttattggaaatgattttacatttaattctcgtatttcaaaaaccatttttagtctctgttcttcactctcattcattccaattataccgcctacacatacatctagcccagcttttttagcatcttttatagtttttatcctatctttatatgtgtgtgttgtacatatattatgaaaattatctctacacgtctcaacattgtggtgatatgtagtcacacctgctgacttcaacattttagcttgctcataatctataatacctaaagatgcacataattttaaattagtattttccctcaatccttcatagatatttaaaatattattaaactcctttcctgacatacctttaccacttgtaaccaatgagaatctatgcactcctttactctccatctctttagctctatttaagatttcattgtaatctaataatgaatattcttctacaccagttttataatgagatgattgagcacaaaatttacagtcttcactacatttgccagatttagcattcattatcgtacataaatctgcttttcttcccataaaatattctcttatttcatttgcagattttaatagaatatcaaaatcgtttttattatttgtatcaaggcttattaaattaagagcttcttcataacttatttctttttctctcaatactttattttttaattttattatgtatttttccatatatcctcctatttgtcaacttaatatttttatgtagtttacttattatatatagtattgcatatataacatttattggtcaactttattttagacacaagtttactatacacaaaaaaatactgcttcaaaataatattagtatatagattatacatattattattaaagcagtattttttattagaatataattcttactggtttataaaactatccttgtcttaactccatccaagctttccattgtaataacctctaagccttcatattctctaaatagccattttaaatccttcatggcttgattaacctgactttttgttagattatttataaaatattcttttctagtttcctcatactctttgctagtcaaaaagtttcttagaaaattaaacgcaaatacacttggaatattgtttacattagccttcttgctgttttccttctcatagtaaattttcataaatgcatactcctttgatacttttagatttctcttacaataattatatgcatttaagtgctactattcttataattttattaattcatattctttacttcccatacccatttcacatgcatagtctattattctagttccatttacatgaggatgttcatgtttgaaaacatcatgacccatttccttacaaatcaaatcatagcatgcttgttcaatagctacagggtctgttgatgctaatattcctatatcatgggcaattggtctacctgaccaaggtacacaatcacaaagtggagttacattcataacaaaagttatataccctaccttgtcttttttatttgatactgctccataagcgtattctgccatcttttcgacaaacacatctgagtcactttcccattgtatagttactgctctagttggacagacagttggacattctccacatccataacatacatcagaatctataactgcttttttatccactatacttatagcttttgtaggacaagaattaacacactttccacaacctacacacttcttttcctttactactggagtaacatcagaatgttgcatttgttttcctgctgcacttgcacatcccatagctaagttttttaatgctcctccaaaacctgctgcttcatgacctttaaaatgactcattactatcattgcagaagaattataaatttctccacctatttttacactttcaaaatgttttttgtctatttttacattctcataatttctactatataatccatctgcaattattactggtgcatttacaactgcataagcaaatccattttctatagcagttgtaagatggtctacagaatttgttctactccctgtatacagtgtatttgtatctgttaaaaatggctttccttcgcagtctttaaccttatcaaccacttgtctaactgccacaggactcatatatgtagtatttcccttttctccaaagtgaagtttaattgcgacttggtcattcttttctattaaatctttgaatcctgcttcatcaaataatcttcttacattgtttggtacgtttttattttgcgaatttgagtataaatcacaaaaatatacttttgacttttccatatctacacccctttaaaatatttacttaaaataattttatcacttttaaaatgattttttagtatattttaccacaattaaagattcttatctttatttaatgaaaacaatattattttagtccttcactactttagactctatatactaaacacctcaaataactgataagcattagattataatctatatctctttttttagatagttccttaaggtaataacttaattattataaagtatagtgaggaggactaaaataaaaaagaggcttatttctctatcttgagacagcctcttttttacttaaatatattcttctacaatactaaacacattttcccacaatacagcactatttgtatttataataaaaatatccttaaactgcttttttattaaacaaaacaacagctaataacagacatactatcgaaataacaattgttacaatgattggaataataaattctggaggtgtcactttacctgaaactaaatctatattttttgataatatgaaattaggcgtataaggtgcaatctgtttaggaatagaaatcaaactcaaaatagcagttgctgctaatacaagtaacacacttgcaaatgctggtctaaatagtacacacccaagaattaatatggaaatatacataatactaattaaccataagttaaatgctgaaaatataatatgattaagatttgcagttggccaaaaatacattgtatatccataagtacataaaaagctcaaccaaaaaccaattgtcataataattactgcaatagaaaatttagacaatactacagatgaacgtgataaccctttagtcaacataataacgagtgttcctttagaatattcgtttgataaaatattgcaaaaaacaattagagttaaactcgttccaagaccagaaatatttccagaaaactgtgtccaagaatctaaagcagttggtgcagtagtaacttttaaagttggagcaaaatgagcaatcaagtctggcataaattttgcagaaagaggactcattattccaaatactaaaaataaaatagtcaaactaagtaatttataatttcttatgttctccttaaactctttttttgtaaatgctatgtattctctcactttactacctccaaaaacaaattttcaagtgacaattctattagttccatctttactggacaaagattcatttctgcgagtgtagatataactgttttttgtattgcttttatatctttaccatgcaaaacaatttccatattagtttcttctgaatcttttagtaaggatttaatgccaccactagacttaaacttttgaatttcattattacttgcaaactccagtaaaagtctatcctttccgtgcatactttttatttctgaaagtgtaccgctaagagcaatgcttcctttgtttagtatagcaacatggtcacagattctttcaacatctgatagtatatgtgttgaaaatattacagttgttgagtctttgattttaagcataatatctaatatttcttttcgaccaacagggtcaagtgcacttgttggttcatcacaaataagtaatttgggacgtgaaagcaaagcttgagctataccaagtcgttgcttcattccacgagaaaacccacctattcgtctcttttcattgccaagccccacaagtgataacaactcttcactccttatctttatttctttttttgaaagccccgtaatttcaccacaaagagaaagatattcaagtggtctcatatagttgtaaaactctggaacgtcaggcagataacctacatgacgattagaacttgttcttccatatgtcactttctcaccacaaacatctatagttccactatctggttcaagtaacccaagtaccattttcattgttgtagtcttacctgcaccattcttacctacaaacccaaagactgacccttctggtacagtaaaatttagattatctattatctttcgattaccaaaaccttttgataatccatttattgagacaatattcatcattcttcacctcttcctattgtaaaatacaagattggtcctattagactaataaacagtactacaataatccatattgccttatttccaattttataatttggatgtctcaatacatgaacaagtgcagtaattataagtattaaatctaaaataataacaggaatcaaaagtggtaaatattccatcaaattttccataatcttattcctccaataaagataatttttctataagaaatttgtattctttgttttcacttaataaagaaaacattggattatttttaatagcagcaacaatacctgcttttacgattgtatcatcacgtgtaatacctgttccaatttcagaaatccatctgtcaagtttattaaaaaagtcatccccatgtattataattgggtatatatcacgtgttgctaaatctacatattttcgtaatgatttaatagctccttcattatccccatgtattaaattaatttgtgtctgtgttaaatatgaagaaagcataatagcaggagataatgtatcaagctcaaatatatctgaaattgctagaatacgtctttctatttccttcatttgtaatttatctgcattttgcaaaatacccactagattttggactaatgatataaggttctgatatgcaccaagttgaaatgtttctcttgcttcatccatttgaccattcatcatttgcccctgtgcaagaagtatagattcatttatcatgggaaaattgctgttttgcaataaatcaatcacttgtatgggttgatttaacaatatataacaagttgcctccatactttttgcttgacggcaaatatctatgtcattacaagtttcctgtatacgaataaatatttctaatgcttcactaattaatagttcacgctttttttcatctacaatatcatagtgattaactattaaaagacccatccgaaaaatcaaaggaaaacatgaataatatttttttatgatttctcttatttcatccatgacttcatcaaacggtttaaccgtaaagtctttgcacagtttattatacagtttattaatatcttccttcatcatttgaggttcataacatattaactcatcaacggtaatgttgaaatatgtcgcgagttgcggtaaaaaggttatgtcaggatagctttgtccagtttcccatttagatacagaagctttagaaacgcctatataatttgcaagttcatcttgtgtaattcctttttctttacgctttaaaatcagcgtttttgcgatgtttaattcattcatgtcaatccctccttatgtataattatatccttaaacatgtaaagctaacaagcgatttgaagttgacttttgacgaaaaaatcaaccacagagaaacaaacgaacaagtatataaaatatatttttaaatatattttaaaaatattttgtgaaatatgtaaactttgtaaacaaaatccatattatatataaaactagtagttaatttatctaaatacagtttttatttatcacgtttttaagtattttgtgtaaaacctcttttaatataaacaccttattttcatttctcatttcatattctttttaaaatcctgaatataactcttcaattttccatttaattcttttataaagttattattcgtatctattcctctaattataacaggcaactatcatgtattagtaattgtctattatataaaaatctataaaagaaaagcagtcaatcatttagattaactgcttgtacatatatcttattaaattgtataaactataatttttattattctccattttcatcccaagtcataaatccccgtccactatctggataagtatcaatagacttttctctaatcatataaccagttttataacactcttttgttattttattagatagtatacagccttctccatttatctaattccattcaattaacttttattttcaaccttaacttttataaaatcatctttttttaataatttcatacttattttctcttcaacatcatcaaatgagggtgtctcaaaattaactttttacttcataaggcactcttttttgtatgaagtaaaatatattttcatcatttcaataataagcaagaggcttatctctattttgagacagccccatttgatggtgttgaacatttaaataaagttgaactcgttttatctctctttttaagatatctgtaaatttgcacataaagtctcttcttcttttacaattctaatagttttattaaagccaaagtatatatctccatattctttcgtatatgatttattggtactctttcatctactccatgaccaccagttttatacgctaagaacttaggtccaaacgccaccatatctttaaaccaacttgcatatgtgccaccacccatagcaattgtatatccattttcatctgttacttcttcataggcttctaataattttttaagtactaaattactctcatccacataatgtaagtctttatgagcaataacctctattttccaaccattacaaaaaacctttttgaatctatctattatgttatttaaaactatatttttaccataccttatatctaactcacatacgattttttcctcatttacttttaatattcctaaatttaaggtagtgtttttgaatacctcatcatattgattaatccccaatgcatctccataataatcactacaaaggtattttgaaactaattctatatcttctctatgctgaaaatccatattatcctcaactatctttattaccattttagatatagcattttctcccttttcaggattacttgcatgtacagctactcctttagtagttaactctgaaataattccattaataatttttgcagtacaatgagatggaacaacattttctttagttcctccccttactattatgtaaggtttacttttgtcaattttaatttctttttctatccttatatgaacccttcctttttctccattaaccactggatacatagcatctggagtaaatcccatacttggaatttcttcacctttatctaagtaatatttgatacatttcatatctgtctcctcatttgtaccaaaaattaatcttattcttttattaattgtaggatacatatcctctatgtttttcaatacatgtataagcatagatacagcacccttattatctatgacacctcttccataaataatattgtcaattactgctcccgaaaatgggtctacactccacccctctcctggtggaactatatctaaatgcattggaatccctattaattcctctccctctccaatttctgcatatccaatataattatcaatatttttaacactaaaacctaaactagcacagtaatctaaagttttatctaaagattttttaggtcctataccaaaaggacattgtgaaataggttcaccttgttgtgaatcaatttttatcaattcttttagaaattctatggttctatttaaactattatctacacttctgcttatatccataaatcaacctactttctatctttttaaagcctgtccttaaagaacaggcttttagcattaaaaattatttttttgtaaatactaattcacaaacttcatcatcatgagcacatttttgagcaaaatctaatttaacaccttgtgcacagtcaactcttccataatccccataacaagctaatctacaaatttcttttctttcttctttagttaatccatattctttccaagcagcatctaatggacagtgatggaattttaaaacgccattctcatctgtattttctactaattccatttcaaacactttttgtcctttactgttatataacatttctgccatttttcctggagtatctgctacgttatatttttgacctctcattttaccaaatccatatattgcttctttacatatatcatctggattagctcctaatttttcagcttctttcataagaagatagaaccatactgctctttctcctgttgctcctctaattccttctaaatattccttttctgtatacattttttctgacatttctttctcctcctaaaattaaattctatattttaatcactgtgaattagaatattccaatgaatgatcctaccaatgctaatacaactaaaattactaataacttagttattgtccacttcttgtatttcattccccaatatacgaagaatacaacaccaagtggtaataaacctggagcaatcatatttaatgtatcttgaacaacaattgctttaccaccaatatcaaatgatagcggagttgaaagcttaactgtagttgcagataatgctcccatcataaacattcctagaattgaagcaccatcaattatcttattgacaataccacctgatagaattttcttaattgaatctctacctaaagaatatcctaaatgaaataagtaataaccttcgcaaaatagtaatatactaaacattattgggaaaaatgcacctataacacttccttctgctccaaatgaagcacctaaagctaagaatattgtttgaaatgtaccaaaatctaaagtatctccaattccagccaaaggtcccataagaccattcttaacacctgaaataacttctcctgggatttttccttcagtagctttctcttcttccatagctaaaactgtaccatgaattaatcctccccatatagcttgagtattaaaaaattgtaagtgtctctttaatgcatctactaaatcttcttttttcttatataacttttctaaagccggagtgaaacttgcacaaactgctaatgcttgcattctttcaaaagaattagataactctgctgtccaccaccatcttaggtatgtttttgttacatctttctttgtgagtactcttgtcttattaacttcagttggaccttgtccatttttaacttctttattttttatttcttgcattatacttcacctacccttttgtcttctttcataaaggtaattaaaagagctatacaaacaccaaatattgcagctgcagtaattgatatttcaaaatattgaaccataaaaaatcctataataaacattggtaagaatttatttttacctatagtaaatattgttgttgcaaaacctaatgcaggtaatataccgcccattactgttaatccattcattaaccattgtggtataacatctaataatgattgaactaaatctgctccaaaaaagttacatacaaaaactattggaaatcttaaaacaaacccaaatattaaagaataaagtgttgcacatctccagatgccttttgtattaccttcttcagcatacttatctgccttatgaaccaatacagcattaccagttcttcttaagttattaactaatactcctataacacctaaaggtaccgcaatagatactgcaacttctgcattaacaccagtttgaagtgctactggtattgcaataagagcagctagacatttatctgatggaatatttccccctgctgcgaccattcctagataaaccatttctatacttgcaccaacaatcataccagttgttacatcaccccaaagtaatccaaggctaaaacctataaataaaggagactttagtgttgagaaaagggtataccctgcaagacctgctgcaaaccaataccataatcctgttacaattgccaacatcaaaacagattccatttataattcctcctaatttatattttttatttaaatttctttaacgcattttcatatgtcatagatgattcctctggtataacttgtaggactatttcaaccccattttcattaagttcattaagttgttctacatcctcatttcctaatgaaacagctgtaaacaccattttctttcctgcttcatttggaatacctcctaattgaatcttttcatatttaagtccagctttataagccttatttgccatatcaacatttttaaatagaataaatatatttttatctcctaaagtgttgttttggaatgcttgtcccgcatcttctgctgttaaaataactacttctactcctgatggtgctgccattttatatatgtcagccataaattcatcttgacctaagaagtcatcaactattattattttttgagcttgagcgatttttacccattttgttataacttgcccatgaattaatctgtggtctactcttactaatgttatttttgccattatattcacctcataatttatatttttttaaattctttaattaaatccacacaaaggttattattttttttgacgattctttctggtaatgtatgtaatttatcttctttgcttaattcttcatctacgattaaaattgtctgtaagctaagtccatttattgcatctattcctcttcttatagcaacagctattgcaacacttgatgtagatcctccatataaatctgatattataattttcacatcttctttatctactacttcttcaacctctttcataaatacagaaacatctttttcagaacttagtgataaaacttcatattgatttgacaatccaaagtttttatttgtttcttctactaagacttttccccaagttccatggcacagtataattaccttatatttattcattgctaaataaactctcctttatagcgattaatattttggtttaattctacttcttcttcatcaggtaccatttgaattgatacattaatattctttttaataaattcatctattaaaagaaactcttttttattaatgtatacattttgagatattttcttttttcctattcctgtaggtattcttccaacaataagttttttgatattaatcccttcttctatcattctatttgcagtatctaaatttttaattaatacaaaaacgttatcatcagcttgattattataaaaatatctccttgattcacttacagttaatattgataaatcaatattctttggtgctgccatttttatcaaacctttagcaataacatcattggttgtttcatcatctactactactatcttttttacacctagatgcttaacccatttatatatcacttgaccatgtattaatctatcatcacatctgcaatattttactaaagacatttttaatcaaactcctttttctattacattgagctaagaactttattaatattgtttataccagtttgtcctgcttcaatacatgcttctgctaactcttctaaactttttccctctctattaattaaagcttcaagtagcattggaagatttactccagtaagtgcatgaaacttgccaccttttttaaggtttaaacttgcaacattacttggcgaacctcctaataggtcagctaatactaaaactccgtcaccttcatctaattcatttaacttttctacaaaatttttatttaagtcttcaatattatcattcctatttagtttaattgctgctgttctttctgctggtcctgcaataagttcacagctttttataatttcttcactaaaactcccatgagtcataactattattcctatcaccaatttcacctcacttttcttgtcactttttatataagcaattgccgtgccaacttatgtgtatcaataataaatggctattttacaggatttaatcaaaactttttactcaattttttttaaaaacttattatttcgatatgtatcaaaagattttttcaacctgtatcaaatctgtatcaaaaaaagtaaaaaaaagatagccttttggctatttttaaattttgtatcaacttttgaatttatctgtatcatattgtgattcaaatatatctaatatatttgcatattccatatctgaaataattatatcgaatgtctcttctactagcttaaaactttcttttataactaaatataattctttatttctactaattctttcttcatatgatttataaactaaagactcttttattattactctttcaatcatacatgaacaatgaaatataaactttactaaaagttcatcttgaattactaaagaatagtgttcactaattctattaattacttcttttaatataaaataagccttttccccatttaaaaaagtcaaagttttactaatattatcaattagtagtctatcaaaatatctaccaccattatctttttcagcatatgtaacttccatatctccataatgtttctttatagattctataatattaaaatataatttctctaatgtcatttctggagttagagcctttctagttgcttctattacaataggtgtacttaccatatctactgcttttacttcttttcctgtagcatcacgaataactttagcaaatgttaaaatagaccccatatcagttaaaattaaaattccctttcctttatcaattttattggctatttctacagcttgtactaaaatatcctgaactctatcttctaatcccatattaattgccactgcatggttacaatccagtaaagtattggctacattcaccatgctagatgctgtagattcaccatgcattatgactaatattgctatactctcctcatttaatcccacatacgataaataaagaaatgttgctaaaaaaattgcttcatcttctggaaactctactccatacattaatgacatgttagataatatttcttttgctatgttatattcatatgctctttccttcataatttcatctttattaggatgctttactatatttccaatctttattctttcaattaaattctgaatatgtaaggctatagcttttattaatttatctaatccttctcttttgctccatttatcatgcttttgtaaaatatattttacagtagttgcaattgaatcattaacaatgttgttataagctgtttgattactattattatatataaaagtattcattaaattataggaatacttctgtatgtctccatctataacacttctaatttgtgactctttaataccttcttgttgaagtttattccaagtttcttttatcattccataaaaatctaaatcatattttttattttctattaataaattttcactttcaaaatccttttcttctggtaaaaaaataatatcatcttttccaataaaactgaaattttgtacaaactcctcttttctattatttccatataatgattctctaatattatttggtagaagagagagccttacatatacacattcccttttataggtcatataatctaaaaaagctcttgcacaaattaattgtatatcgctttttaattggcctatgtttcccttacacttatataaaataaatgccttaataacttcttttgaaacctttaacttaacaccaatcctaacactctcttctttaaaaaaataacatataagcttcattctctcttgaaagcctctttcctctaaagacggaatctttatagttacaggtattcttcttaaaaacgtttccaacattgctgtttctgggtcttctgtagtggctgcaattatcataactctacactcgtgtaccttattagcctctcctaaccttctatatatccctttatccataagcagaaatagcatttcttgtccctctgcagataatctatgaacttcatctaaaaacaatactccattattagcttcatgtacaataccatacttatctttatcagctccagtaaatgctccttttacatatccaaaaagctgcgctaataataattgctgattatcagaataatcagcacagttaaatatgataaatggtgcattatcactatcttcttttatagttaaactatacttatacatatattctgcaaatatagatttaccaactcctgtaggtcctattattaatgtactcaaccccttaggtggatatattactgctgctttagcctgttctatttgggaccttaaacttccatcacatcctactaaattaaaaatattgttctctttttttatactctctaaaatatactcatctttgatagaatcattttcactatattcgtttatagagttaatattatcaaatatccctttatttagtttctttcccaaaatactctcaatactttctttatataagtactgaacaggcttaccctttatctttataataatactttcttttattaattgatttaattccttactagcattacttctatttatacctacttcagtagctatatattctgcatcaaatccaaatctaatgccattattaaagttcaagtgttcttctgttaaccttttcaagcaaattaaaactttttctttccttgatagcttcttttgtgtcatagttaacctcccctataagcagtaatactgttaaacatttattattaagcttaattctacaatattttaatatttttgtctaattatgtaactattgattttctttcctattcgttttataatataaattacgttaccctcatcttttatagaggaggaatttatatgaattttttatcagatttacacacccactctatagtcagtggtcatggctatagcactttactagaaaatattaattattgtaaagaaaatggaattaagatactaggtacatctgaacatggtcctaagatgcctggttctccccacagatggtactttcacaacattcaaaatatcccaagaatcataaataacattataattttaagaggctgtgaagcaaatatactagatattaaaggaaacatagacctagagccttttgtaattcctcggttagattatcttatcttgtcatttcacgaagctgttttttctccaaatacattagagaataatactaaagctttaataaatgcaataaataagcatgataatattgaaatattaggacaccttggaaacccaaactacccaatcgactatgaattaatcattaaattagctatagaaaagaatatcttaatagaaataaataattgttctattaaaggcgtgtcaagaaatggtagctcggataactgtaagtatattgctacactttgcaaaaaatatggtgctaaaatcatactaacttcagatgctcacatttgttttgacataggtaactatgagtattctgagaatatcttaaaggaaattaattttccagatgaattaataatgaattatcctaaaaaacttattaatcattttcaccaaaaaggtaaattactagatgttgattatacaaatatctaagtaataatacatgcttactttaactcccataaaaattttaatactatttatattatatgaaataaagaaattataataaagaagctatttaataaagcttaattacttttatgaacttgatggattgatatggtctatgatggtaatagaaattataacatttttaataggcttagttttatataccttatagtataaagctaaaaaaatatcatctaaaaataaagtaaatcttatataagatttactttatttttatttgtaataatcgtcaatacaaattattttattatatgtaattatttatatcttaatcaattttattgaaaataacagtcttctcttttaaagagatttttcctacttgatatccatattcatttaattcttttttatatttcaaaaacgaatggtctatctctattccagcaatatcttttatttcttcaaaagttaatttaaacgattgactattatttttcttaacatattcccataaagaactatatttactcatattatatcactccttttaaaattatatcttatctattaatttatattctatcattattaatgtataaagtcatgctacttattatttatatacaaaaatatccaaataataagtagcaattttttatagtcataatatttttttcagattaaataaaaatcaattatagttaaaatattttttaaaagaaatctatcccattataaagtaaattttaattatcttatttctagtatgtaattattcaaaatagtatatcattattgaaatacacatctaataactaaaaatttttacatattcattatttaaaaatctttttattgcacttaaattaaatctatcaatatttcagtaataacgttttcttaattttcactatggatgtcgattcaattataattaaagctctacatcaatctttttaccactcattgaacaacaactaacttttgccttatcaatagagaatatttcaaacttaccatctcccacagagtacatctgacctaaacttggcattatttcaagtgccttagcttgtgtttcttttgatgtaacaaatactgcttcacctaaaatacgtagagtattaaggttttggtctatacaacaaagttcaacctttggattaaaaataagttgcttaaacatatccttttgattagatgtgcaaaatgtaagtttaccattgtattccataacaaatcctaaaggacgcacatgtgcttgattgttctcatcaactgttgctaaataataaactcctgccttgttcaaaaattctaatgctttcataattcttacaccccttttaaatacttgtattaaggattatcctttgatataattttaatataaaatacagaaaaaacaagtatgcagttttttctgataaagtataaaaaagatactactataactaaggagtaattaaaatgagtataaatactgaaaaaaatataactaaaaacgttgaagaattaacctgtccaatccgttatgcattagacattgtcggtggtaagtggaaattacctattatatgtatgttagcagttgaaaatccaattagatatagtagcataaaaagaaaattggatggcattacaaatactatgctagctcaatcattaaaagatttagagtctactggtattgttcatcgtaaacaatataatgaaattcctccaaaagttgagtatacattaacaagtaaaggtaaaagtattgtgcctattttacaacaatttgctaattggggtgctactaatatgcaagaaaaaaacacatgtggacttagttgcaaagaatgtagaaagataaagtaaatttactaaattattcatattatagactatatattaatttatctgattgaatataaaaacaggatgacttatatattcatcctgttctatatgttaagctctaaatttaattagttcaagcatatcgtttaataccaataaactatctacttgaatcattagccatttacttccattaaaaaagtttacctcattatatatttttttgatataatcacaacaagtattaataaataaatcaacctctactctattgctttcacttacaataaccaaagctttaaaataaccttcttgtggatataaagtacatagtgatttacctctttttttatattttacattccaacctctttgcattgaacatttactgtattcaagcttaggttctacattataagtagaaaccaaagttttatttaacttgtcccataatggattattaataaattcattaatttgctcaaatgtaggtttagtatcttgaaaaaacgcatcttgccaattcatattcatcatcctttctattgttcaataggaaccggaacaatccaatgttccagatatgctgcttcaggtgtagtggggtaatacatctcaattgcaaaatcagtagttgttaaattatgtttcttcatccatctttccataaatttatctgctttaaaaacagctgaattaactaactcattaaagttttctgcctcaaatccacatactaaatattctttagctggcaactcaaaagtattatatccttctactgatgtacctgactctacctctacacctgccatatacatacaatttccttcttttgcatttcccatataaagagcagcaaattcatttccacctggaatttgatttggtatattatgtctttgacttccaagtttcatccataattcctctactattgcaattccagttgtttcaccacccaccaactggcaaataggtacttctatttctattccaacaaatgtccttggattactcaatgtcttacgattgacttcaatcactatatcatctgcaatcagtggaacaccttcatcaaccatagcataatttaaaattaattctggcttaataaagtgattgagttttactggatttgctctatatttttctggagttaatccatatgcttttttaaaggaacgtgtaaatgtctcatgactagcaaatccaaaatttaaagctacatcaagtatacgattcttatgttctgctaagtattcagaagctcttgcaagacgacgaagctttatatactccattacagtcttatttaccaatcttttaaatagtctttgatagtaaaatggtgataaatttgctttatttgctaattcattaattgatatttcttctgataaatttgcttctattaaatccaatgtaatttgaatagactcccatgcatgcatactataactcctcctgatatttttgttactcttaccctttatagtatcaaaactagaaaaaatgttcttgatagatagtgccctttttaattttcttatatgatagtgctaaatctcattgctttattataaacataaaatatataaaaataaaatatagcaaatctttaggtaagatttgctatattatatattttattaaactatttttaaatactccatttatttccttaagaaagaactctttcatatcatctaattgttctttatcatacacgtacttaccatatccaaattgaccgtatttaaactttctatcctcattttccattggcaatagtgtatctggataaatctctagtattctattttttgctttagttgtatatctatgagatataacttcaaatataatttttttatcaaaatcctttggtaaagcttcttttatacttataatcagatttttatactcttctttccaaccttcatataaaaacacaggtgctattatgaaaccaatctgataaccagccctagcaagttttacagctgactctattcttttatttgcagaggctgtataatgctcatgttcatttataattctaggagtattgatactaaatcgtatttctgtatgattattatgttcagcatccaataagctatccacatcactgtatttagtaacaaatctaaatcttcctttttcctctcttccaaaaaactctattgttttcttcaaagaattagtatatggctctactggaactgggtctgatgtagctgccccttcaaatatggttacctgtggctttctatcttcaatatatttttttgtctgttcaagtatttcatctacatttacaaacacccttataaatggtttatcacctaattgtgtgttcaaataacaatactcacatcttcccatacatccactgacaagtggtagttgataattagcagaaggtttacatgtttgaaacttcagactttttctaatcccaactaccatagtctgcttcccacttctatattgttcatatagattttcacctggaatgtgttctttaatcctatttgatgatatattaattatctctacatctttattatctctaaatttattgtatatttttttgcccacatcagtgtctaaagttcctttttcgaatattattcttttgggattaaacatttatttcacctctacttaaagtttttaaatcgaagaattttataaaatattacttaattaatcttcccttttttaaactcctttatttattagaaagtaaaataaaagcttaagacaagtttattatatatataacttctatacacaatttttttactattaattacttataattttttattattaatttataatttttatataaaactaaatatgtaaagtcaaattataaagacttatggtacatttcctttatttgttccttattaaaatactttggatgtctcttaatatttgcaactgatattttcatacaattatcagttaaccaatctatatctgatttttcaatacctaaatcacttagttttatatctaaatctatttttttaaggaaatttctaattgcatctgaacaatcttctgcacaagttcctcctaatacctttgaaatattaccaaatctttcaatatcaatatcccatgaactttctataatagtaggagtcaacgctgcaagtccttttccatgcattacatctctaagaccacttacaggatgctccattccatgtggcaaggctgtacccgctgtaccaatcgtcattcctccaatagtacttgcaagtgttattttttcccatgcttctaaatcattaacatcattatatacctttattaggttttctgatataagttcaatcccataaatagcttgtacatctgcaagagggtttcttccattagaaagatatgcttccatattatgggcaagtgcatcaaatccaactgatgcaattatatgctttggcattgtaaccataagttctgggtcaattattgatgcttttgcatacatactattcttctttatagattttttatctttagtttctgaatttgtaagtactgcaaaacaatttccttcactacctgtacctgatgttgttggaactaagattataggtaaagcttcttcaccttgtctaattccaaatatataatcatttaaatctcctgggtttttataagaaaaagctatactcttggcagcatccataatgcttccaccaccaagccctaaaacacaatcacatccagttgattttataatttctacgcctgaatatatagtagttataagaggattttgttctactctatcaaaaacttcatattctattttagagtcttttagtaaatctattgttttatcaagtaatccagttttctttgtactatttttacctgttactatcaatacttttttgccatatttagatacttcttttcccacatcattaattctgcctctcccaaataagatatttactggcaaattataattaaaattcatgctaaaacctcctatttctactttagtaataattttatgtttttaacaaagtgtaattatgtatttaaacataaactaaaaaacaatcttttacttaattatatgtattatcttattatatatcaagttaactatatttaactaaatagagttttttattagaacctacttaaatatttaaaaattaaccaaagataaaaaaataaagaacggtctgtctcaaaatagagataaatatatttttcattgttgaaatgattaaaataaatttaatttcacataaaaaaagcgcctcatgaactgaaaagttcattttgagacacttctttctcatcactgatattgaatactttttataaatttgcttcaatgtattcaaattcaatcttataattctatcaaaagactcataagcttattacttctttgtacaaatgaatctaactcatctggctttaattctttattagaaagtaaagctaaatctgctatctggttacaaataagcgtaatcttatctttcttttcctcatcatctttaagagaaaccaattttttgattattggactgttctcatttattacaagagttttttcttcctcaaaattcattcctaaatccattccagcaaatcttgactgcatttctgccattctaatagattgttctgatactaataccatagctggagtgtcttcatttttcaatccttctacagaataattcttcactctttctccaacagcttctttaaacaaaccttctatcttagctatctcttctttgttttcttcactatctttattttcatttttatcttttaatacatcagaaaggtctgcatctattctattaaacttaactccattctctttatattccataaatgaaataaaatgagtatctattgatgagtttaaaacaacagcacttaagtcgtattctttaaatagtttaatgtattgagattgctgttccttatcacttacataaaataccttattttcatgtttgtccttacatttttctaaataatcttgtattgttatatactcatcatcaatagttttgaataatatacattcttttaccttctcatagaaactttcatcttttaagcaaccatatttaataaatatttgtatatcatcccaaaacttattgtattcttctctttcatttttacaaagagattttaacttatcagctacttttttaattatatgtttagaaattttgcttacatccctgtcattttgtaagaaacttcttgatacatttaatggtaagtctgggcagtctataacaccttttaataaaagtaaaaattctggtataacttcttttatattgtcagccacaaacacttgattgttgtataattttacttttccttcagtcagttcaaactcattttttaatttagggaagtaaagtataccctttaaattgaaaggataatctacatttaaatgtatccaaaataaaggttcatcaaatacattgaatacctttctataaaactctttatactcctcatcagtacagtcttttggagattttaaccatagaggattagtgtcgtttaaaggctcaattacttttgcatctacaatctcttcttttccatcttccttttgttttttagctttttcttctgcttctttagcttctctttctaatctttcaacatcttctaaatatatttctactggtaagaaagaacagtatttatttattattcctcttacagtaaattcatctaaaaattctttactatcatcatcaataaatagtgttatagtagttcctctatcatttctagcatctgattcagatatttcgtattctgtaccaccttcagatatccatcttacaggagtcgctccttctgtatatgaaagtgtatctatttgtacctttttagacaccataaatgcagaataaaatcctaatccaaaatgacctattatgtcatttgactcttccatcttatccttatatttattaaagaaatcttcagcacctgaaaaagcaacttgatttatgtatttttttatctcttcttcagtcataccaattccattgtcaataaatttaagtgtaccttctcctttatttacagatactgtaattttataatctgatgacttattttctgatatttctcctagtgatacaagtcttttgtgtttgcttactgcatcacatccattacttataagctctcttataaatatgtctttatcagagtataaccattttttaattataggaaaaatattttctgtatgaattgaaatactccctttttcaaattccattttttatccctcctcattttataattaatattttaaattttttaaaatggtatgtcaatatattataatcatattattttaaaataaaataatttatttttcttatctaatttaactattcttcttttaaaatttcttttacttttgaattattatacatactatttggtaccttattaactaacttctttaatgtcaatttagaattttttaaatcaccattgttatagtacatcatccctaaattataataagattcatcaaaataagcatctttttctgagtaattttctacatacattttataatattcttcagcagttttatagtcttttaacttttcactgagaatagcaacttgataagttgcttcagatgtattccctttattttcacctatatctgcaactttcttatatagttgtatagaagatttagtttttttttctgattttaaagtattcgccttagacatcaattcatcctctgtaaataagtcagaatctttatcatcttcattttctacagtattttttttagattttacatcagcctctttattaatgtttttattactcttatttatattagaagccttactcatatcttcattttcttctatattattttctttcttagtcaagttagaatctattgactcttcatttttagtttcattatttttagatattttatcagttaaattattcatcttataagaactatatatactttgtcctactaataatattcctaatattatggctatatataggtacttattttttttaatactttttttcttattagaatctgaacttttctggtttttgcttgaacttttttctttagttacattattataatcattaattttatggttactactacttttatgtaaaaactcattcttataatcatctacttttacattacttttagtttgtatattagcactattatacatatctaatgtgttattttcttgatttaataaataattttccttatcaataatcttcaatacttctaaacattcatcaaattttatatattcttcttccttgtcatacagtaaggcaagcaactcataaggttctattaaatcacagtattggtcagttataagtttaaacccttgtatagcttctttatacattcctttatttattaaccttataagttgattgtacttttcaaagaaaattaaaaactcctcagatgtaagcatgtttatatacttttcacacagagcagttttttcacaaagtgaactcttatagaaactttctacagcatcatcaaaattacattttagtaagtttacaagacctgtgagatttaatatatcaacatcatctgggtttaaatctcttgcttgttttaaaaattttaatccagttgatatacaattattatttatattattaatagattcattatatagagaacatgagtcttttttattgagttttagtatatctttttttatatcatttaagtttaaaataagtaccacctcatgccttaagtattaattgatgttatctctaaacaagagattttaccatgtcttcttcacttactatacttgttatctttacaccaaaatttaaatctaccaccactacttttccataagccaaaaccttattatctattagtatttccacatcttggtctgctaaagtattcagttcaataagagaacctttatgtaaatttaaaatatctcttagagtcatcttagttctccctataactacagataattctaacttaaggtcaagtatcctttgtatattatttcgattaacttcagagacatctaaggctaactcatcatccccatcaacttcactttcaactttatcatttaataacatctttgcttcttcatctgaaataagattactattgtccataactacacctcttttccaacagcatcatttatttttacaccttttttgcttgatataaatcctggtgttgctgtatatgattttgaattttctacaaatatatctatataatcatttatttttttatttgttactattacatctccaacttctagtttaagtaagtcttcaacattaattgatacttttcctatctctgcaataactgataattctatattagatacactattatagatttttttggtaaattcctctgaatcatctcctacatcattatcaaaaaattctataacagatatactttctaatagagcctctaaaccattatacggaaaacaaagagaaacacttccaatatactcattatcatttagcacttttaaatctacaacgcatactggtgcagttggagaacataattgtggtaaattaatatgtgtatgtgtatccaatacttgtatattttcaaaaccttcaaataagtgcatatttcttactaaatcatccataagatgtaaaagcacttttttatcaagttctgtaagctctctatcattatcctttataactccagttcctccagaagttatatcaatccacatatcagctacacttctatctattctaaaagaaaagtttttcataacaggttccattgcattttgtactactacacatgaagaagttactctatctaaaaaagtctgataatttacttggtctatactatcaacaatcatactagaattacacttaagttcataaattatatagtttttatattttttacaaaattcagctaataaaaaatttaaacaagttaaattttctcttgaataactctgaggtttgccaaaatcgtactctttcatatcattcatgaatattcctcaccttacataattatttagctcttaaattattagctatttgccacatttcatctgctgtctttattccctttgagttcatttgaaatgctctttgagtggctattaagtcaacaaattcttcttgtaaagaaacatttgacctctctctatagccttgaactatatctactttctcaacttgtttaatctgtgctgcatcagttgcgacgaataaactatctccttcagatataaaattttgagttcctataggttgatataaattgatttttcctatttttttattatctacgaataactcgccatttcttgaaactgttaagtttgtgctatctatattcgtattattatagttatatcctgcatcaaattgaacatctaatatatttccattatcatctacaatcttacctaaaccatctatattaaatccaccatttcttgtatatgcatatgtaccatcttttcttatcactctaaagaatccttctccatctatcgccaaattactcttactatctgtaggggccaatgcaccttgttcataaattctcatgggagctgttgccttagctcctgttccagtcgatatatcattgccatttgtaggatatgatggtctatttagtacttcatccactaaatcagaatattccatatttatttttttatatcctgttgaatcagaatttgctatattgttagatattatatctagtttactttgatttgctgataaagctgttttactagtataaaacattgtgtacataaaaattcacctcctatcacctatcttactgaaccaatctcacttgctatttttgctaatttagaatccatagcctgaattatcttttgatttgcctcatattctcttgatatggtcatcatattattaatttcagataccatatctacattagaagactctatcgcactttgtattgtaagtgcattatttactttcatagctcctcctccagaatacaagttatctccttctttttttaagttattgtagtcattaaaatctacaatattgaatttatacatagcatttccatctagtgatattgtattatcttttgccacttcaaatttttgatttcctacatttatatgacctacagcaccagtagcagtattcgtcccaagtacataatacccttcacttgttataaggtcaccttgattgtctgttctgaagttcccatttctagtgtaaaattgatttccagctgcatcactaactagaaaaaatcccttaccttgaatagctacatccattttattatcagtagtttttataggtccttgattaaaatttgtgatagtttcatccatagaaatacctggacttatatcgcctataatctgcttttgtttagttccatttgcgtagttattgtaaccctccaactttaattcatcaaaacttttagtcaaaagttgtttacttttatatccatttgtatccatattagctaggttattgacaacaacattttgcttttgttgattagttatcatagcagaaactgctgtatataatcctcttatcacattatgacctccttttttgtaaatgtctaaacagtatcatctattctaaaactttcatctcacttgtatatttcatgcctaacgctctggcctttttttctatctctgccttactcatatcattattactaaaaagcattatgcataaagttgatattaatataccaatacctattcctaagaatacttttttatcacataataatatccttatattttgtaacaactccttattaatgacagttccccctttccaatatctagcatcttacatatttccacatcatcataacctgaacttataagatgtttcactttaagagataactcattttcttgtcttacttccttttttgattctataaatatgttttcctttctttcttcattagcctttattaggttataattttcataaacttttatatgattattacttcttatttcagcaagtactttgtctaaaaagaatcttcttttttctgcaattattaatctatcatttgcttcatattcttgctcaaatattttatcaaagtatctgttatctttattttttgattccttatgtaaatttataactatagttactattattaaaatagacactactattaatataatttgtatcatcttatcaatcaccatctatatagaatatttaagttcttttatcttgtttcttaagtttcttattgattttctgtggagttgtgaaactcttgattctgaaacacctagcactttccctatctcctttagatttaaatcttcataatagtacagtgaaagtattaatttttctctttcatttaaattactaattgctttagatagaatctctaacttttcttcttcttctattatattttctggagcttcctcttctctatcacttattacatcttgtacagtttcatttgtatcttcaaagattacatagtttaatgatacaatatttaacatgtctatattactttcgatatcatgaagttctttttctgaaacatttaattcttttgcaatttcatatgaagttggctctcttaataatttagattgcaacttttctaccactctattatacttatttactttagttagattatgtttagaaattggactttgatttctaatttcatctaatatagcagattttatttttatataagagtaactagaaaactttgcccccttttcagcatcaaatttatttattgcatcaatcaatccaatgactccactatttactaagtcttgatattcaaaacctttccctggtataaaaaattttcttgctatactctttacaagaggcatattctcttttattaattcttctctattcattaactacgcctccttagcttttaaatatactaaacatctttcttagaaaacttttattatcaacaatatcttctcttgactgacttaccattctctttgctatggctataatacattttgatgcaatacttgtaggatattctaaaatgaatggtatctgtttttttacacataaacttacttttttgtcatctattatatatccatacaattctagattaaggtttagaaatttgtccacaaccatttttattcttttgtatgtagattttgcttcttctaaatcaattaccctattgattattatatttgcacttctctttatgccaaaattacttatagcttttaataaactatatgcgtcagtcaatgatgtcggttctggagttgttattaagaaaaattcagtactacagtatataaatgacaataggcttttgctcataccagctcctgtatcaattattataaaatccacatcgtgaatctgttctatgctatgtataaacttatttctttgagcttctgtaaagtcttctatatgattaagggcagaacctccagatattatatttacaccatacttagtctgtgaaattatatcttctatatttttttcgccattaattacatcaattatagtcccttttacatttacccccattattatatctatattagacattcctatgtctgcatctaatataagaacttttttattaagtttggtcaagcatatagacaaatttgtagcgagattactctttccaacaccgcctttaccagaagctattgtaattatcttaggtacattctcattctctactataaactcatcaagtcctcttttttccattgccatttttctcaaaatttgagcttggtctatcatatactttcaactcctaatagtaaccttataatcttatcttcattaggttttataatatcatcaggaacattttgtcctgttgtaatatatgatattggtttttgtgcataattcattatgttaaatattgagccatatgttattgtttcatctagctttgtaattattaagcttttaaaattcacatttctatatgaatctataattgcttttgtatcactttctcttgttgtacaattcacaactaaatgtatattatcagtttcagctttatctataagatttttgatttctagtatttgcatagagtttttatagcctctacctgttgtatctattaatacaacatcacaatctttcatctcatcaagtgccaattccatttcatcgggacttattacccctttaaaaggaatattcattatatcagtatatatcttcaactgttctacagcaccaatcctgtatgtatctatagttattactcctacttttttattttcttcaaaaactaattttgcggctaactttgctattgtagtcgttttacctactcctggtggtccgactagagcaattttaccatttattgcttgattttctattttaatctttttctttaaaatttctactaaatttttgcttgtatcaattccattgaacttcatttcttgcaaatcaattcttatagattctacaatttcttcatttaattctaaacttagtagatttttacatattttatctatatcattatcattcttattatcaaaccccatattgttaataattaactttaattgttctatctctcgttttaaatctttttgttctacgttttctctcttttcccatccaatagttagttcaatatctttctttgaaaagataccttgtattccagactttcttacttcttttttatctattaatgtaatattgtcacccaattccattttggctagattcatagcatcctgaattgtgttagctgtatactttttcgtcatcatatatgctcaccacaccttctgctttgattttaatatcgttaggtatttcatttaatgataatacagtcaaattaggatatacaatttcaactaattttctaaatggagctcttatctttggtgatactactattactggtatattatgattgaaatatacattgttcattacttcttgtatactctcaaatattttatttgtattttctgggtcaactgctggataagttccatttacagacctttgtaaattattagataccaactcttcagtttctggagacaatgtagccactacaattgtcttatcatcatcaactaaattattacaaatacttctagccaaggctattcttacatattcagtaagaagctctatatcttttgtatttctagactggtctgcaagcgtttcaagtattgtaaccctatcctttatatttactttttctcttaacagatttttaagtactttttgaatttcaccaagtgtcattaaatctggtatcaattcatctactacagcactataattttctcttgctgcatctataatagtcttaacttcttgtcttcccagtaattcgtgtgcatttgattttattatatctagtaagtgagttataagtattgtggatgaatctacaactgtataaccctttatctctgcatcttctaccttgtcactttctatccaaagtgcctctattccaaaagtaggctcaattgtctttattccaaatatactaaatccttgattcatagggtccatacataaaaccatattaggcattatctcatacccaccaactacatttccctttatttttatattgtattggtttggatttaactgtaaattatctcttattcttatgggttgcacgactatacccatgtctattgcacattgtcttcttattgatgctattctctgaagtaaatctcctcctgctgattcatcagctaaagatattaaaccatatccaatttctacttctattgattctacatttattaagtttgttacatcttctacttcatttttatctggatttaccatatcaggtttttcaaactccaagtcttctaaagtatctttcttttctcttcctaaaaagtaacctgctgctatagcacctatacctagtgaaaaaaatgctggtttaggtaatccaggcatcataccaagtacgattagaacacaaccagtcatcattactgcttttggtattgccgttaactgtttacttactaatccaccaaagttttcatcagtagaagctcttgttacgattatacccgctgatgtagatattaatagagcaggtatctggcttacaagaccatcccctatagtaagtcttacatatgtctgtgctgcacccataagagtcatattcagcattacagctcctattacaattccacctattatgtttattgctgttactataagacctgctatggcatctccctttacaaacttatttgctccatccatagagccataaaaatctgcttcttgttgaagctcttttcttctttttctagcagttttgtcatctataactcctgcatttaaatctgcatctatactcatctgcttacctggcatggcatctaacgtaaatctagctgttacttcagatactcttccagaaccattggttataacaacaaattgaacaattaatataattaagaatataattattcctactacgtaatttccacctacaacaaaacttccaaatgcctctataacttcacctgcatatccctgtgttaaaatcaatctagttgatgaaagatttaatcccaatctaaatagtgttgtcacaagtaacactgttggaaatatagataaatcaagtacatttgttgtaaataatgtcattagtaaaattagcacagataaacttatgttaattgccagtaaaatatctaatataaatgtaggtaacggcactatcatcataagaacaatccctacaacaccaaatgccactattacgtccatattttcctttaaattaaacttattcattacttatcctaccttttgaggactttgtatctatttttgattttatatactgctactaatatctctgcaaaagcttgatacatgtcctctggaatttcttggtctatttctacttgcttatataacaacctagcaataggtttattttctattataggtatgtcatttccctttgcaatttcccttattttaaaagctaaataatctgcaccttttgccaccactactggagcttggtctttccctttttcatatctcactgctatagataagtgggtgggattggttactattacagtagcacttggtactgcttgcatggttctttgagacgaaatttgtctttgtttttgttttatcttagcttttatttctgggtctccttctgagtttttatattcatctttaacttcttgttttgtcattctaagttgctttttatgactgtatctttgataaacataatctgcaactgctataactatcatagctacacaaatcttacttaatattgaatatactaaatctttaactgtgtacattaaagttggcaggtatatgttacctagctttaatatatctaaataattatcttggaagaatgtatatcctatgtaagccaaaatagatataatcgctgtatcctttattaaggttgacaaacttctcatagaaaacatgtttttaaatccactaactggatttaattttgataaattgggttttaaagtttcaccagtaaacagtattcccacttgaaataggtttgcgactatacctaaaactaagaatggaatagctattggtaaaaatatcttaaaaaaatccattaatcctgctataactaatttctctatacttgaataatttatattcatataaaaatctagactcaaaaaataattaagagaagatttaagtgtatccactacatatgaaaataatgtaggtactaataaagtgaatgcaagtagagtcattgcaacgggtaattctttactctttgctatattacctttttttctttgttctccctttttctttggagtagcctcttctgttttatctgttgaacccataaaaaacataggagctagtgcgaaagttccctcatacatctttggtatttgacttaataaatgacttatttgattgacaattaaaggtattgatatgataaataacgcaataccaaccagtatttttaatggcataccaattatcattacatttagttgaggtacacttcttgatataagccctaatataaaatctgccataagcagacaaagtacaataggtattgctattttgaatccagttaaaaagcactgcacaaatatgtttattatataatctatattattatctacgaatgatttccctattggaattaactcaaaactataccttatgcctctaattaaaacatgatgaccatccatgctaaaaaatatcatacgtgctgtccagttcataagattatcaattaaagttgtctgagtcattgaatttgggtcaaacatattaatcattgataatcccatctgttgatccatcatagaacctgccattctgatactataaaaacatagattggttatatatccaagcataatgccagttatggtctcatttataccatataaggtaaacaatacaatgttgtctatatttgttgcatattcaatttgcatagtacttgaaatcaatattgatataatgattgcaaagagcgacttaaataaagcaggtgtaccagctggaaatagtatccttagtgttccaaagaatgccactattctaataaatacaaaaatcatatatatcctacttatttagttataagagacatcatattgaatatctccgaagtaaagctaataagagtatgtaacatccagcttccaccaatagctactactaaaagaattgctattagttttggtacaaaagtcaaagtttgctcttggatttgagttgtagcttgaaacacacttattaaaagcccaactacaagagaaacaatgagtactggagctgcaatcatagctcctgtaaacatgccatttttaagaacactcattatcataaattcactcatactatttttctcctatccaaatcccaatatcaatgtttttactatcaagttccatccatccaccattacaaataataataacttaaacggtaatgatatcatgactggaggcaacataaacatacccatagacatcaaaacacttgccacaacaaggtctattatcaaaaatggtatatatattaaaaaacctatttgaaaagcagtttttagttcacttatagcaaatgctggaactacaacagatagtggtatattttcacgagttaatttcttttctttcaaaccagcctgttctacaaataaatctaaatctgtctgtctggtttgctttaataaaaattctttaataggtccctctgcttccttcatagcttcttccatagtaacttcttctttcatatatggttgtaatgccttttcgtttatctcatttaatactggtctcattataaatattgtcaatactattgcaagccctaccaaaatttggcttggaattgcttgctgtgctcctaatgctgatttcaaaaatgataaacttataactattctgacaaagcttgtcatcataaacattacaaatggtaaaaacattaatgcagttagaaataaaaacaattgcattgaacttgtatatggtacatcagccaaaggtaattttgataatagttccatttacttatcttccttttttgtaaattttccaatatatctactgaaatcatatttctttttaattctttccattttaaaatcttgaattttaaaatttctttctttaatgtcgttttctattcttaatatttcttctttggtcaaatcttttattttattcatgctagaggaagaagatgccataatgcatccttcttcacctatttttaaaattattatgctattgtttttacttatatttacaatatctagtatttttatatatttatcattatatttttttaataaagttccttggctaatttttaaagataagactatcaatattaaaattattgggatacatattaatatttttagtaaataaagtatcatgtcttaccatccttttattgcactactatatttgtgaaatatatattttgaattacattttcacctagttgtatatttaatgtatttttaatttcttcttttatgttctttaaattatcagcagtaaaatcatctgccctttttgccataaaacaatttataatattatccctaattaaaggcgtatttttttctatatctttatatgaagaatcataagatacagttattgatacttttaaatatcttacaccttcatcagctagctttaataccatctcttctaagtcaagattttcggtctttacttcatctttgcctttccctgttggaataaacaaacctgcaatcttgtcaatttgtttatttccaccttctcctaatataaaaaaacctgctcctgctgagaaaataatcagtatcaaaataattataataatttttttatttttgaacaaacctcttcctcctagtcaatagttataagtatattaactcttctattctcagcccttccctttgctgtttcatttgaaaccaaaggttgatactctccacatcctgttgccgaaaatagtctagggtccatgcccttttcttctacaaagtatcttacaacacttactgctctactagaagataaatcccaattggattcatgtgtacttgattttacaggtacattatcagtatggccttctataactatcttatttttcatcatctttatcatgtcatatactttattaagagtggctttactatctgcttttaattcagaaatcccagagtcaaataaaattgaatcatctagttctagtaaaatccctctactatcatctttgactgttacactattttgtaagttagaattattaactttatcttttaaatcctgttctaaatttgacttatcatttttatccactaaaacactctctattggagacttctcacttgtacttgaacctgtactgaacatacttatcccagaaaactgaccttttaacgcatctgctatgtttttaaatttttccatatctacaactgatgtagcatacaataacacaaaaaatgtaagaatcagtgttatagtatctgcataagtagccaaccatgcatctggatttatctcatcctttttcttattttttttacgcgccattactcattgctctttctgtatttttattggatttcataatttctagcttctcattgtttgaaaggtatgtagctaaacgttcctcaactactatgctgctctccccagattgtatgcttattataccttccagcatcatttcctttacataaatctctttttcagtcttctcatctatattatatgcaattgggttcaaagcgatattagcaagtaaagaaccataaaatgtcgtaattaatgcttttcccatacccgatgctattaaatctggagatgtaaggtcagataacatttgtattaaacctattagagttcccaacataccaaatgcaggtgcgaaagtcccccaagttttaaatagtttagaatatctgttattggtttcttcaacagaatctatttcgagttctagtatagaccttatttcatttacttcaaggccatcaatacataactctaacccttttttcataaatgggtcttgtattttcattacatcactttctatagataaaagtccttctcttcttgcttttttagaaagtgttttaaattgatttaataagtctaatttcgatatattcattgtcttgaatgagtattgtagcgcatcttttataagttttatatcatcaatagtaaatgtaatcatcaaagctccaaatgacccaaatactgtgattaatatagatgcaaaatcgaaaaaacttttcaatcctgaactacttccttttactgccccaaataaaactaatactgtagataatattagtccaatgaatgttagtgaatctgtttttttcattatttttcactcctaatataacctacatttacttttcttttatactttattactttatctactatctcatctactgactcttttacaagatttttttctcctgttgtaaggagaatcctactttctggtacagagtcaattctcactataaggtctgaatttaatatgtatcttcttccgtttaaatccgttactcttatcataatatgtacctactatctcttaagatttattatttcttgaagtatttcgtctgatgtcgatattattttactgtttgcttggaaagacctacttgctattatcatttctgtaaattcttctgctatatctacattggaagcttctattgccccttgtattatgtttcctgtagctcctgctatttgtggatctcctgagtttgctgatggcttgaataagtttcctccttctgcatctagtcctgctggattttggaatgcatatgtttgcactttttgtattgtaccttttaatttatctattccagcaggtgtatctcctaccttagcaccatcaggtatatcatagacaaattgagttctttgaccatcactcaataaaaattctactgttccatcctttgatatattatactctagtacattttgaactgttccatccttaggacttatactttgaagtggtattacaataggctcttttcctttagcatcaccctttttaatgaattctccagtatcagctttatattccccatcataaatcacaccttgtaacatatatccatcaccatttacaagtcttccacctttaatattcttcaaagcaccatcagctgctttaaatcctgtatctaaattaaaagaaccatctctcgtatacataactgttccttgtcttactactggaagatatccatctccatctatcattaaatcagatggcctattagttggttgtacatttccttgtgtcatatctttatttatacttgatatcttactacctacacctacttgtcctaagtttgttccccctaatgccgctgttggagcacttgcatatagtacagtttgataaaatgaatctgttattctagctgaacttttcttaaaagaagtagttccagcgttggctacattgttacctattacatctagttttgtttgatttgctttcattccacttacacctgaatacattgcttttatcataaatttacctcttttctcatttaatattatacttcttctggagattcttgttctgaagagtcattttcttctcctgaatttgcatctacctctcctattttaagtaatttttcatatttaacacctacagttttgtcacttccatctacttctaattctaagtgtacttccccatcttttatatatgtggattttactactcctacaatgttttcatcttcttcctcttccccagatacttctacttctttaccaattaatgatgttgccatactcaaagcagaatttattagagtggaattgcttaaggctaaaagtatatctagcttatcattcatagctgacatcttttctaaagttgcaaactgtgctaattgtgatacatattctgttgggtcttgtggattcattgggtcttgattacccatctgtgctacaagaatcttcataaacaaatctttatcagcatcatcgccttgtcctataattggagtcccattgtctgttactgtctgatttcctttacttctaacttgtttattggcaatatcattaatatttctttcaagttggcttaaattatttgacctatagtttacctgagttcctgccaaagccgttgctattccgtacatgcaatacttcccccttactaagctagtaaatctactctatcatcatcaataatattttctttaatctcatcttctatgactacattgttacgcttatcatttgtattttgcttactcatgttttcttggttattttgtctattctgttgttcaaatgctttatcaaaggtatcagatgtatttgtattatcgctatgcatttgcactgatacatcttttatatttacatttgtaagttcaagatgttgctttaaatctgctatgtttttatttatagagtcaaagacatctttgttgaaaacagtcacaacagctctcatactttcaccatcttttaacaattgtatgttcatatctcctaattcttttggtcttaatttaattgtcaattcttgtatatcatttgttttcatatgcttaatagcttttatagaatcatccattacatttgattctatctgttttaaattaacattatcatttttaattttattcatatcaacgcttttatttattacttgtccaaaatttccactcttatttccatttacccctgctagtttttccaaaatatcagaactatcatctttctgtttatttgagttaagagtatctattctattgctgtcaaaactgtacaagtctatgcttttagtatcattttctgtagttttactaattacttcaatatcttcactagcattattttctaaaagttctcttaacttcattatgtctaaattttctatatcattagggttatttgtactagctctatttaactctaaattttgatttgcaatcttatttaatatatttttattaagcttaagttcttgttttaattcatctgatatacttagtttttttagattattcaatatagtgtttatatctttatcttttttgtaattatcttttaaaagattcagtaattgatgtaaagcttcattattattactacaatctttttcatatgtattttcatcttctaagtgattacttttatcttcatctaaatgacactcattatcactattttcccgtttatctgaactaacattttgcttacttgtttctcttctatctttaacctttttatggtctgttgccttatatagattatcttcaaatttattattttttatatttttattcttagatgagctttttctattcccaatatctttaataatattataagaatctgcttgtatcttcatacaataatatcctcacttcctactattttatagaacttgtctatttctcaaataactcatgcttgcaaactcatcattagtgctttgttcttttaactgttcttctttataatactgtccatattttttttcttttaatttttctaatgactttctctctatctgtttgcttataagctgctttctagctttttcaagttcatttgtcgacttatccagctcttctgataaatccattatagagttgtttaaagctaacaaatagttaatagttattttttgattttgaacactatcattatttttacttatagaatatttgctgtaattactttctaagttttctaaattgctctctatatctatttttttttgttgaatcttagcaaattccatttttatctcttcttcatcttttatttttaagtctaaaactttctgtaatctaaacttaaaatttttatccaattccatcacaacctattcaaatatttttttaaattgtttattcaaagattcttcttaaactacttatagtttcattaaaagaactcttttcatttattccttgttttaaaaaattaataatatgctcatgatagtagattgcttcatctatttttttgtttgtacctgaagcatatgcacctatatttatcaaatcttctgcttctctatactcagcaagcatatctctcgcaaaagatgctatttttatgtcttcttttgaagcaatctcattcataagtctgcttaaactgttcaatacatctatagaaggataatgattcttatttgccaagtctctagataaaactatatgaccatcaagtatccctcttgttgtatctgctattggctcattaaagtcatctccatcaactaatactgtataaaatgcagttatagaacctttatctgatgtccctgttctctccataagttttggtaaaatagcaaatacagatggtgtatatcctttttgagctggtggttctcctattgctataccaacttctctttgtgccatagcaaatctagttactgaatccatcataagtattactttttttccctggtctctaaaatactctgctattgcagtagcagtaagagcaccttttagcctaaccaaaggagctttatctgatgttgcacatacaacaacagattttttcattccctcttcacctaaatctttatcaataaaatctagtacctctcttcctctttctccaataagggcaattacatttacatctgcttttgcattcctagcaatcatacctagagtcgtactcttacctactccacttcctgcaaatatccctattctctgtccttcaccacaagtagtaaatgcatctattgctcttacacctgtttccattatatttcgtatcttttttctcttcattgggtcaggaggttcattgttcaagttgtatctatctcctaaaacagcatctgagttgtctataggatttccaagaccatcaagtactttacctagtaaattatcgctacacataacacttaaaggtattcccttagaaataactttacaaccaggagctatcaatgttagctctcccaacgccattaatatgacttctttatctttaaaacccactacttcacaattcactggtttattgacttgattgtatataacacataactccccaacaaaagcttttattccttcaacttctacagtaagtcctattatcttctttactctaccttctgatatagtgagttctaaattttctattttcttatttattttgtcaaaatctatagatatatcagttttatacatactttattcaccaagcaattcttcttttagtttttccatagcacaatcgataccaactattattcttccattttccttttggatgatagcattgcctttatctatactatcatctgcaataacaaatacacttgattttagtgatgtttcctctttgaataattcaaactctttctctatattatctttatagaaagaattacatcttactataaatgaactacttccttcataatcttgaataatttgctttaacaaatcactcatagattcttcatcttcgaaatgcttttttagaacagaactagccatattaatagcaagtcttacaatctctttatttttttcttttatgtactcagtcatcttctcattagcttgtaatagtattaagtctgcctgattttttataaaatctgcttcatctttagctttttgggtatattcatcatatgactctttatatccatcttcatatccatttttttgaccttgactataccctttttcatatgcttgtttttctatattttgtgcattcatttttgcttcttctaatatctcattcttttttatctcagcagattctatagcttcttttattacctcatctctaaatctacaatcattttctttatttacatttgattctcccactctaactttatctattatggttaaatctagcactcctttatatgatgcttttttacttttaataatcttattattcaacaaagtcaccaccaaaattccttacaatagttatggcaccttctctttcaagttttcttactatatttgctatcttttgttgagcagcctcaacctgtgtaacttttatgacaccaaccatttccatttcttctttaagtgcatctgctgctctagaagattgatttctatatatagcatctgaaatctcatcatccacaccctttaaggcatatactaaatctttcatagtcacttcttttaatactttttgtatacttatatcatctaacttgacaatatcttcaaagacaaatatatgagatttaatttgagctgctaaagccgggtcttgttcttcaatagttcccaaaatattcttttctgtttttctatcagaattaatcaatatttgaactaaggtagacactcctccataatccttaaaatcatcaccacttattgagtgtaatttatcttctaatgaactttcaattacctttattacttctggagatattgaacccattgagcttattctcatagctacttcattttgtaaatcaaaatctaagtatgataaaacttctgctccattttctggctccatatgtgcaagtaaaacagctatagtttgtgcactttcatccctaagtatttctaatattttctttacatctagttttataatatgtttaaaaggctttgtacttgtatttattgatataccttcaagtaatttgtttgctttagcatttcctaaagcattgcttaacaactctcttgcatattcaagcccaccttctataacataatcttttgccctatttatctctacaaactcttttaagatttctcttctttcttttgaagctattgaagaaatatttgcaatttctaaacctattttttgaacttgtttatcaggcaagctttttattatatcactagacacatttggtcctaatgtcattaataatacagcagctttttttaaaccctcaccttctatcttctctttcttatcactttcatttatatcacttaagtcaaacgcattaacatttgtaatttccgtggacactttctatcccccttactcatttaaccaagtttttattatctctgttacttggtctggcttttcttctgcatacattttaacagcttcctctaatgtcagttctgggtcatctcctaatagaggattatccttcctatcaacagaatcagatttagaaatataatcttcatcttcataatccatatcttctcgttcacttcttttcttatatattaagtatccaatagctccaattgctaccactgccactactccaataactgcttttattatgttctttttaaatccttcttttttaatctcttctagctcttgtttagcttctgccttcccttctgggtcaaataccattgaaacaacgctaagagtatctcccctcgctccatccatacctatagcattattaacaatatcctctacatcagcttgtacacctttagctatttttccatctattgcaacagaagctgtcaatctattaagttctccaggcgcaactatagtgtgagtttcaatcttacctgtttcatactcaaaactctcatctaaactatcttctgtattagtaccattgttatttccttggttattcatgttagcatctacaccttgaacattatttgtagcagatttagatgaatttttcgaccttgtctcctttattgcaactttatcagggtcaatttttatctcagttttttcagctgtatcaaaacttaaatcagcatttactgtggcttttacttttcctttaccaaatattggttctagcatttctaaaatagacttttctaattgtttattcaatgcttgttcagatgccttatttttatcaacattaatcaaactatttgttggttgattattttcatcaacatcttcatcctctaaaataccttcagataataaattcattttgttatcaatgacttgaacatttttctctggtatatttgtaacacttcctgatataagtgccataacagattttatttggtttttttccaaagtcgtccctggttttaacatcaaataaactgctgcactccctggaatagcctccttctcaaatactgatgactctccaaatgttatatgtactctagtatcttccacttgtggaaaactctttattgttttttctatttcaccttgtatcattctttgcttcttaatctgaaactcttcatcagtaagtcctattgatgaactatcatccattagtgcaaatcctttagaaccacctgtaagacttggtgctagctccagccttaacttatcaacttctgttctaggtacataaatcgtacttccctttaccttagtatctatctttttagactctaattctgctgatatatctgcagcatcttgaacatctagttctgaaaataagactgcatacttatttttgctcgcagatattgctgtaaatactagcgctaaacatatagcaataacccctatacctaatgctattttagttcccttttttagagaacttatctttgtcctagatttagcaacttgctctttaatcttatttttaaaactggctatcattgattattactcctgttcaaaaggctaaatttgtaccttattcatttcttgatatgcatcatgaatcttatttctaacttctattaaatattgcatagatagctgtgcttcttgacctattaacataacttcatgcatagaaacatcttcgccttttataaatttttctttcatatcatctgctgtcacttgttgaaaattaactttatctatagtatctattattacatcttcaaagttctttttttcttctttattattaagagttaatggttttgtttctccaatcaaattatctaactttgcaccttgcattaaattgttaatttgtgtaattggcataatttatccctactttcctatttccaaagcttttgatatcatagacttctgagcattcaatgtatctacgttagaatcatatgctcgtgaagctgttattaaatctgtcatttctaccaatatatttacatttggatattctacatatccatttggctttgcatctggatgagatgggtcatatacttctttaagaggtgatttatcatcttcaacagatgtaacttttactcctagcatacctaatttattatcatagttttcttcaaatgaaacaacttttctcctatatgcttctccatttggacctcttgtggcatttatattagctacattggacgatatgatatccattttcaagctttctgctgttaatccactagcagatattctcattccactgaacacactcaccttttaattacctcccacttattattgatttagtcattgctatttttccatttgcaaaacttatcaaagcattatattgtaatgttgccattgcttgatttactttttcttcttctatatctacattattgccatccactcttaatcctttagaattgtctgttttttcttctatttttggcatagcatcatttaatgtttcttcaaaagttacataatgtctcttatatccttcagtatttatattggctatattatttgctattgtctgacttcttaaattagttgcatctaatcccatttttataatgtcatatgtattcacactcactcctcctcaaaatatattttatttattttgcttattaataaaaaatgaagttgctataacaactggtacaccagaggtacgtccatcccggtcctctcgtactaaggacaggtcttctcaaatttcctacgcctgcgacggatagggaccgaactgtctcacgacgttctgaacccagctcgcgtaccactttaatgggcgaacagcccaacccttgggacctactacagccccaggatgtgatgagccgacatcgaggtgccaaacctccccgtcgatgtggactcttgggggagataagcctgttatccccagggtagcttttatccgttgagcgatggcccttccacgcagaaccaccggatcactaagtccgattttcatccttgctcgacctgtatgtcttgcaatcaagctctcttttgcctttacactctacgtacgatttccgaccgtactgagagaacctttgagcgcctccgttaccttttgggaggcgaccgccccagtcaaactgcccacctgacagtgtcccaagaccagattcatggcctatggttagagtcccagtactacaagggtggtatcccaaggatggctccgccaaaactggcgtcctggtttcaaagcctcccacctatcctgtacatgtagtaccaagacccaatgtcaagctacagtaaagctccatggggtctttccgtcctgtcgcaggtatccggcatcttcaccggaattacaatttcaccgagtctgttgttgagacagtgcccaaatcgttacgcctttcgtgcgggtcggaacttacccgacaaggaatttcgctaccttaggaccgttatagttacggccgccgtttactggggcttaagttcactgcttcgattgctctaacagatccccttaaccttccagcaccgggcaggcgtcagctcctatacatcgtcttgcgacttagcagaaacctatgtttttggtaaacagtcgcttgggcctattctctgcggccacctgatggtggcaccccttatccctaagttacggggtcattttgccgagttccttaacaacagttctctcgctggccttaggatactctcctcacccacctgtgtcggtttgcggtacgggtacctttaacctcgatagagacttttcttgacagtgtgaaatcagctacttcgctactaaatttcgctccccatcacatcccagcattatcaaagcggatttgcctactttgactgcctcaatgcttgggcacacataaccaacagtgtgcttagcttatcctactgtgtcatcccttctctcaaacggttatcggtagtacaggaatatcaacctgttgtccatcacctacgcctttcggcctcagcttaggtcccgactaacccagggcggacgaaccttcccctggaaaccttgggtttacggcctgtgggattctcacccacatctcgctactcatgccaacattctcactcccatactgtccacatgtccttacggtcatgcttcaacccgtatgggaagctcccctacccatcattactgatgccgtagcttcggtagtaagttttagccccggaaatcttcggcgcaggatcactcgaccagtgagctattacgcactctttgaatgagtggctgcttctaagccaacatcctggttgtctgtgcaatcccacatcctttaccacttaacttacatttagggaccttagctgacgatctgggctgttgccctttcgactatgaatcttatcacccacagtctgactcccaagtataagatgacggcattcggagtttgatagtcttcggtaggtgcaataccccctaggacattcagtgctctacctccgtatctctcaccttgaggctagccctaaagctatttcggggagaaccagctatctccgggctcgattggaatttcaccgctacccacaagtcatccccgagcttttcaacgctcgtgggttcggacctccacgaaattttactttcgcttcatcctgctcatgggtaggtcgcccggtttcgggtctacgtcaagtaactgaacgctcagttaaaactcgctttcgctacggctccgcaccttaagtgcttaaccttgctacttaacgtaactcgttggcccgttctacaaaaagtacgcggtcacacaagaaatgtgcttccacagcttgtaagtgcagggtttcaggttctatttcactcccctcccggggttcttttcacctttccctcacggtactatacgctatcggtcactaggtagtatttagccttggagggtggtccctcctgcttcccacagggtttcacgtgtcccgtggtactctggatcatatctgaagtcttctcgtttaacatacaggactattaccttctgtggtgggtctttccaaacctcttcaattacgatacctcttcgttatgatatgtccgcaaccccaataaagaaaactttattggtttgggctaatccgcgttcgctcgccgctacttacggaatcgaatttctttctcttccttcaggtacttagatgtttcagttccctgagttcccctcattaagctatgtattcacttaatgatacttagacattactctaagtgagtttcctcattcggaaatcttcggatcaaagtttacgtgcaactccccgaagcttatcgcagcttatcacgtccttcatcggctcctagtgccaaggcatccgccctgcacccttaataacttgaccagttaaaaaggtttgatagattaaattctccttagaaaggaggtgatccagccgcaccttccgatacggctaccttgttacgacttcaccccagttattgattccaccttcgacgacttcttccaaaaggttagataatcggcttcgggcgtctccaactcccgtggtgtgacgggcggtgtgtacaagacccgggaacgcattcaccgcagcattctgatctgcgattactagtaactccagcttcatgtaggcgagtttcagcctacaatccgaactgagagtagctttaagggattagctccaccttacggcttggcaaccctctgtactacccattgtagcacgtgtgtagccctaagcataaggggcatgatgatttgacgtcatccccaccttcctccaggttatccctggcagtctctctagagtgcccaacttaatgatggcaactaaagacaagggttgcgctcgttgcgggacttaacccaacatctcacgacacgagctgacgacaaccatgcaccacctgtcaccaatgtccccgaagggaactctccgattaaggagatgtcattgggatgtcaagcttaggtaaggttcttcgcgttgcttcgaattaaaccacatgctccgctacttgtgcgggtccccgtcaattcctttgagtttcactcttgcgagcgtacttcccaggcggagtacttaatgcgttagctgcggcaccgaagggggtaacccccgacacctagtactcatcgtttacagcgtggactaccagggtatctaatcctgtttgctccccacgctttcgtgcctcagcgtcagttacagtccagagagccgccttcgcaactggtgttcctcctaatatctacgcatttcaccgctacactaggaattccactctcctctcctgcactcaagtctcccagtttcaagagcttactacggttgagccgtagcctttcactcctgacttgaaagaccgcctacgcaccctttacgcccagtaaatccggataacgctagccccctacgtattaccgcggctgctggcacgtagttagccggggcttcctcctcaagtaccgtcattatcttccttgaggacagagttttacgacccgaaggccttcatcactcacgcggcgttgctgcatcaggctttcgcccattgtgcaatattccccactgctgcctcccgtaggagtttggaccgtgtctcagttccaatgtggccgatcaccctctcaggtcggctactgatcgtcgccttggtaagccgttaccttaccaactagctaatcagacgcgggtccatcctgtactggctcacctttgatattcaagagatgcctctcaaatatattatcccgtattagcatacctttcggtatgttatccgtgtgtacagggtaggttacccacgcgttactcacccgtccgccgctctttaccgaagtaaatcgctcaacttgcatgtgttaggcacgccgccagcgttcatcctgagccaggatcaaactctcaaataaaagtttatcag

SEQ ID NO: 5 - DNA, 41087 bp, synthetic construct
  source 1..41087: mol_type = other DNA
atacctagtctttttttattgaaaggagttgatttgtatttcaataaaaaattccaatcgagaaaaagcgtttgagatttacaaagagaaaaatgggagaataaaattaattgatatctctaaaatgttagaagaaaaaagttgcaatattagtcgttggaaaaaaattgatagatgggattatagacttggaataaataagaaagttggcgcaccagccggcaaccaaaatgctttagggcatgaaggaggcgcaccagtgaataatcaaaatgctagaactcatggatttttctctaagcttttgcctgctagaacttacgagattgttaaatatatcgagaaggatggtggtaattctttagacattctttggaacagtatagtagttcagtatgcgaaaatattagattcttttaagattacccatgtcaagaataaaaaagaccatacaactgacattaagaaaaatggtaataaaattaaagagtatgaaattcaacactcttgggataaagttacaaatgctatgaaagcagaggcgacagcatttaaagctttgtcaaaaatgataaaagactatgaggaactacttcataaaaattgggatttagcaacagaagaacaaaaaaacagaatagaaaacataaaagcgagaacaaataagttgactggtaatgacttagaaatagaggatatagaagaaatagaggcagaaatatatggcagtaactaagaagaaaactataccttttttatttggagataagcacaaagaatatattaaaaagtgcgctatcaatacatacaatattgccgaaggtgctgtaagggcaggcaagacggtagacaatgtatttgcctttgcgcatgagataaagacatctaaagataagatacatctagcaacagggtctacaagtgcaaatgcaaaattgaatattggagatgctaatggttttggacttgaatatattttcagagggcaatgtcattggggcaaatttaaaggcaatgaatgtttatatataaaaggtatttcaactaagcataagcaaaagattgttattttcgctggaggtgctaaggctgatagttataagaaaataagaggtaactcgtatggtatgtggatagcaacagagataaatctgcaccatgataatactatcaaagaggcttttaatagaattatagcatcaactaatcgtaaaattttttgggatttaaaccccgataatcccaactcgccaatttacaaagaatatattgatagttatatgaaaaaagatagggaaggcactttactaggtgggtataactatcagcactttaccatccacgacaatataacagtctcggacgagagaaaacgggcaattatatcccaatatgacgagggtagtatctggtacaagagagatatactaggtcagcgctgtgtagctgaggggcttatatatgaatactttgctaataataaagagcagtttaagactgaaacaattgacccactcatggatgttattgttggggtggattttgggggcaacaaatcatatcatgcttttgttgcaactggaattacttataactataaaaaagtaatagctcttgcaagtgaaagacctagcgcagataccagtccagatgagttgaatgctttacttataaattttataaaaaaagtaataaatctgcatggtaaagtagattgtatttactgtgatagcgctgaacaggtactaataaaaggcattaaaaatgcagtagaaaaagaaaatttaaatgttagtgttagaaatgctttgaagaacgctattaacgataggataagacttacagacttattaattagtcaaggtaggtttgagtatacaaggtatagcgagactcttgttagcgcattatgtggtgctgtttgggatagcaaagaaactaatgaggatgtaagacttgatgatgggtcaagtgatatagatagtttagatgcttttgaatatacgatagagagatacttgaaaaagtttataagaggtgactaaatgtttgaaggattgaaaaatgctataaggggggtgattaacaagttgtttaataagagttctatacaaaatgaattaaaggtagatatagctgttagtgataagatgtcaagagcaattgacttgtggatggctatgtacaaaaacaaagccccctggctaaatgaagtgactaaaagtttaaatttatctgctacaatttcaagtgaagttgctaggcttgttacccttgaacttgaaagcgaagtagtcgggaatgactttttaaatgaacaatatcaagacgtattaaaagatataagaaagtattgtgagtatgcttgtggggctggcgggctggtatttaaaccatatgtaagcggaaacaaaatagaagttgattatgtccaggcaagtaatttttttcctacagaatatagttctacaggcgatattacatcagctattttttcagaaataaaagttaaaggtgatattaaatacactagattagaatatcataattggacttctacttcttatactatctctaattacgcatataagagtaatacagcaaagttgattagctattcagatgatttagggaagggaattaaattaagtgatgttccagaatgggcagagctttcagaagagttagtgttagaaggaattgaaagacctttatttgcatactttaaaatcccacaggctaatagtttagaaaactcatcacctttgggcgtttctgttttttcaagagcagttgacttaataaaagaggctgataagcaatattcgaggattttgtgggagtatgaggctacagagatagcaattgatgcagattctagtatgttcagaagaaacgcaaatggagaatatgaagttccgcatggcaagaaacgactgtacaggatgttagaaatggaggatggagacaataaatggaatgtgttttcaccagccataagggattcaagccttttcgctgggcttaatcaactactaagaaaaatagagtttaattgtggattgtcatacgggattatatcagatgcacaagagactgaaaaaacagcaacagaaataaaaactagcaaacaacgtttatactctactgttaaggatatacaaaagtctttagaggacgccctagagggattaatttattctatagataagtggtctattctggcaggatttactcctagtttgaaatatgaaacgactttcaattgggacgatagcgtaataatagacaaagattctgaactcttagcaatgcaacaggatgttgcgtcagggctgattagaccagaattatatattatgaaaaaatatggagtcacagaggatgaggctctgaaaatgatgcccgatactagggaattagtagaggataatccttttgacaagggtggtatgtagatgttaacatctaatgagttacaagaaattcctaagtattttgttagtttatttcaaactttagaggactttgtaatagcagatattgcaagacgtattgcaaaggctgggaatattacagatatggcagaatggcagttaataagagcagaagagattgggatggctgataaagtaattaaaatgaaaattgctgaaatacttgatatctcttttgaggcagttgacaagttatttgaagaaaatgctgtaaagtctattgaaagtgatagtgctttatatgaacatgctaaattaactccattgcacttgaatagttctgaagaacttaagaactatgtttcttcagctaaagagcaaactaagggtaaactgaagaatatgacaggtacattaggattttgtactattaaaaaaggtaaagttattagtaagaaacttacagacatatatatagagtctttagacttagcgcaatttcaagtcagtacaggagtcttggattataagacagcagttaaaaaagcagtcaagaggcttgcagatagtggtttaaggtttatagactatgagactggttggacaaatagaatagatgttgcaactagaagggctgtgctgactggtgttaatcagatgtcgcagaatattaataataaagtcattaatgatttggatactgatatagtagaagttacagcacattcgggggcaaggtgcgagggagcaggtattaaaaatcataagaaatggcaagggaaatggtatagtttgagtggtaaaagtactaaatatccttccttaaaagtggttacgggctgggggcaaggtgatggtctggggggctggaactgttcgcatcaattccatgcggttattcctggcatatctgttcctgcctactcaaaagagcaattaaaaaatatagaccctcccgatattggatataaagggcgaacttatacgcattaccaagctttacaatatcaaagaaaaattgaaacatctatgaggcagacaaagaggcagttaatcgcttacgagtcggcagggcttaaagatgagtttacaaatgcaagtataaagttgcaaagacagaaacaagagtatagagagtttagtaagattgctaaaatgaggttgcagaatgagagacaccaggtttttggatataataaaagcgtcagccagaaggctgttcacgctagtaaaaaggagagaaaaaatgggtaaatatagaaagaaagcaattattgttgaggcttttaaatggctaggaagtgtagaacaaaaggaagaaccgacatggatagttgaggctattaaaagtggtaatgtttggattgaacaaaatttaggggaattatctccacgcatgtatataaagacgcttgaaggtatacatgaggctaatgtgggggattacattgttcaagggataaaaggagaattgtatccatgcagggctgatatatttagagaaacatatgatgaagtcttatatcgataaggcttatttttatgcttaaaaatacttaatttatttatatagatgtctactaagcgacgtaaaaagttagacaatacgtgatgctaccacgtaaaaaagcgtagttgtaaacgaaagcaggaggtttttatgaaaagagagtttttgaaagatttaaatttagaggatgaggttatagaaaaaatcatgtccgaaaatgggagggatatagaaaagtataaaaaagaagtagaaaagaaaaaagaagagttggaaagcaaaaatactgaactcgaaacagctaataataaaattaaagacttagaaaaaatagatgttgagagtataaaaaaagaggttgatgactggaagagcaaagccgaacaggctcaaaaagataaggaattgattgaaaatcaaatgtcagagcaaacttataacttaaatttagataattatttaagtaattttaagttttctagtaatctttcaaaagaggctgtaaaaataaaaatgaaagaaaaaggacttgaatataaggatggggcgtttgagggagcagatgattatataaaagaattgcaggcaaatgacccaggggcttttataagtggcaatagtgttccaaagattgttagttctagcggtggagatgctggagagtctaaagtaagtttaatggaacaaatgatagcaaaaaatagagaaatgttgaacatataggaggtagaaaatgagtttatttgattcaaaaatttttaatggagaagtgtttggaaaatacgttgagaccgtacctaatctaaatagggacgaattaataaggtctggagcaataagaagaagggacgatttaaaggctatgttttcagcccaatcgggagcaaattatgcaactattccaatgcttggcttgattgatggcgacccagtcaattacgacggacaaacggatatagtagcaactacaacaaagaccttttcgcagtctgtaattgttgttggtagagctaaatcgtgggtggaaaaagactttagccaggacgtaaccggcggagttccttttatggagaatgtaggaaatcaagttgctaaatattgggataatatagaccaaaaaactttgttagctgttctggaaggtattttcgcaatgacaggggcgaaaaatttagaatttgttaacaatcatacttttgatataacaaaagaagcagaaacagaaaatcaaaaggttaaagccgaaactcttaatagtgcaactcaaaaagcttgtggagataataaagaaaaatttgcacttgttataatgcacagtgttatatcaactaacttagaaaatttaaatcttgttgctaggttaaaatatactgacccacaaggtattcaaagagaaatgaaattaggaacttggggtggcaaattagtcttaattgatgacaatatgccaactagagaggtcgctgaaagttcagagggttcaaatgatggatacacagagtatacgacatatgtgcttggggaaaattctattgacttcgaggatgttggtgcaaaagtcccatatgaaatggatagagctccaggtaaaaatggtggagaagattacttatatagtagacaaagaaaagtatttgcgccatatggtattagctttactaaaaaagcagttgcaacagcatctccaactgattcagaactgaaaaacggagcaaattgggagcttgtgaatgatagttcggatgggtctaaaacttatatagaccacaaagctatacctattgctagaattatttcgagagggtaggctatgaatatgtatatagactatgaattttatagcgctcttgggggagaaatcccccaggacgaatttaataaatatgcaataagagcaactaagtatatagattataatacttttaatagaatagaagaagttacagaagaaataaaaatagccacttgtgagattgctgacctcatatataaaagcaacctggaaggcaataaggaagttcagtctgaaagcattggaagtcattcagtgacttattcaactaacaataaaacgatagagcaaaaagcatatgatattttaaaaatgtatttagattcagatttgctgtatcgaggtgtttagtgtgttttttaaagataatataactttatataataaatattatgataagtcctctgataaaactttatacaagaggacttatctatttgaagtagattaccaagaggctaaaaatatagctgttacagacaaggggttgttaagtgctgatagtgttaaggttgtagtccccttttctgtaaatgcaagagggaagaaatatatagacccttttaaatattatgaactagaagaaaatgaaaagaataaattttatacttttaaagttggagatattattgtgaaagaggtcgtagactttgaaataactagcgttaagccttacacattaagagaattacaaagtaaatttgatgatgttagtattataaaatcggtcattaaatgcgattttggaagtataagaatgagacatttcgaattggaggcagaataatatgggatgaatgttcatgtagatattaatgcaactagaataatgagagcaaaagggcttggaagagggggcaaggcacaaaagtttttgactcatgaagttagaaggctttcagactcttatgtacctaaacaaagtggaacgctgaaaaatacagctagagaagaagttgacaagataatatatatacaaccttatgcaaaaccgcaatattataataatgcagggtgtggctcggagggtattggagcaggagggaaaaggggcaagcattgggaaaagagaatgtacgcagacaaaggggacgaattaattgggtctgttgctaaatttgttggaggtagaagggaatgactttagttgaaagtgttagagagtttataaaaaaatgtccctatttggatgaatttgcaaaaagtataaatgtcgagtttttaggtgaggaatttacttcttatacattagagactgttccatcagaaacagtcattaaaagatttataaatggcgactctataaaacagtttatatttatatttgcaagtagggagtgttatgggtctgatgttatgcagaatatagaaaatagccagttctacgagcaatttgcagactggatatatagagaaaatttaagtgggaatttgcctgttttgtctggtgataaagaggcaatgtcactagaggtaagcactccaggatacccagttcaaacgggtatagatacagcacaatatcaaatacaattaaaattaaaatattttgaaaaaggagaaatgtaaaaatggcaggaatggaaacgatacaaagatatagagtagcagactacttaggagttttgggggatgatggacaaaattcctgggtattaatgggagcaggatttaatacattagacgaaaacccatccgcacaaagtgactctaaaacatatataaacgatagaaacagtactagcgctatcaaatcttatcaaacgcaattttcgtttgaaactgatttaattaaaaatgaagaggcgataatggaactttacaaaataggtagagaccaggcaactggcgcagatgctgaaagagattatttaagagtagaattatttttaccaattaaaggcaaagaaaatacttttagggctagaaaatttagagtgtctgttgaagtgagtggatttgctggtgcaggtggagaaactattacagtaagtggaaatttaaataccgttggcgaccttgtacatggagaatttaatactcaaacaagaacttttgtagaagatggagcagaagccccgccagctgaaagtttaaaagttttaactataaattcagttgcaggtactaacacagggaatacaaaaataacagttactccaactcttgaaagtgggaatagctataaatataaaactggggcaaatattacagttccaacacttgatactgattgttcagttgggtacactgcttgggatggtgtagaagaaataacagcaactaagggaaataaaatattaatagtagaagttaatgctaataataaagctaagaaagctggtattactacgattacagtaaaagaataagagggggctaaggaaatgataattaataatatagaattagaagatttagaaatatatgatgctgatgtcatggaaagagttgaaacgtcaataaaaacagctatagacgggatacagattgctgaaacagaggaaaaggaaaatcatgcaatttttagaagaatatgtgatttaatttttgcatgctttgataatatttttggggataatacatcaaataaaatatttgctggaaagcgtaatgtaaaagtttgcatgattgcattttctgaattagctgacgaagtagagagacagaaaaaagaaggcatggagctatttagttctattggtaataagtattcaccaaacagaactcaacgtagagctaaaaaataatgaatatgttagtcgatatacttcccgaaagtgttgaaattgatgggaaagagtataaaattaatacagactttagaatatcaattttgtttgaaatgttaatacaagataattctataagtgacgaggaaaagggggaaaatgcacttcttttatattatcctgtaatccctacaaataccacaatggctatagaaaaaattatttggttttattcatgcgggaaaaaagaaaacaatgtggatgatggttgccgaggtggcgcagggtctagcaaaagtcaaatatattcatatgactatgatgacgagtatatatattcagctttcttgggtcaatatgggattgacttacaggacatagaaaaattgcattggtggaaatttaaagcattgtttaagtctttaaaagaggacaccgaaatagttaaaatcatgggatatagggcaatggatgtaagtggagatatgccaaaggctcaaaaagatttttatagaaaaatgaaaaagatacatgctataccacttcctcaaaacgaggttgaaaaaataaacgaaattgaaaaagcattgctaaatggtggagatattagtaatttattataaaataatatactctacaccttccgaattaatatataattagtatataaatattttaatttgggggggattgttatgggatttaaatttagaaaaagcataaatctaggcggtggattgaagttaaatattaataaaaatagtgtcagtgttagcggtggcgttaaaggtgctagagtttcagttaattctaaagggaaagctacaacaactttaggagtccctggaagtggcttatattaccaggaggtagctaatctaggtggaaataagaagagaaatagtaagagtgtaggaagttcagagagtagtaggcaggctcaacagctattaaaaataataaacgattgtgctaatatagttaatactacaaaagaccctaaaacatttttttatagatataatatgttgttagataagtcatatgccttagttgccatagaggatgatttaaacttttcgggtcaatctcctagtcagatgctagacagcataatagcaaaaaggactgatactataaacgactttttgactagatactacaatgaaatgtctagtaaattgaaagaactgaaaactgaaaaggctcgcatgaacaatgcttataaattctctagcttagcaatagattataaagaacatttaaataatgataacaaagctaagcttaatagactatataaacaactattagatgatgttaaaagacaagattaatatttataaaaagaaaaatataataaaagatttaaataaaaagcacttactttttaaaaaaagtaggtgcttttttaatgcaaatttacaaaaaaaaagggggtggatagatggcagatggttctattattatagatactcttttaaataccgaagacgcagagaaacaacttaataacttagctgataccatgaaaaagaaggcgaaaagcgctttagcggtagctggaattggcgcaagtctaggagctataggaaaacaggctattgacttcggagatgaatatcaaaaagcaatgaatagtttcgagtcagcgacaggaaacgcagaagctaaagcaaaaggctttggagaagcgctacagcaggtttatgcaaataattttggcgaggatatgggcgatataagtgaggtcatgagtttaatatctcaaaagcttgatgggatagatgctagcaatattcaagaggttactgaaagtgctattatgatgagggataccttcgatatggatattggggaaagtttaaatggtgttaactctatgatgcgccagtttggggttagcgcaaaagagtcttataacttgattgcacagggtgcgcaacaagggttaaatcagaatgacgacctcggcgaccaattagcagaatattcgacatattacgcacagatgggtttttcagcagaggaaatgtttaatatgatgaaaaacggggcggagagtggagtctatcaaatagactatttaaatgatgccttgaaagaatttaatattagaacaaaggatggttctaatggtactaaggaagcttttgaggcgctcggttttaatgctgatgaactaactaagaaatttgcgaatggtggaagtagtgcaaaagaagcttttattcaagttacaacagctttgaataacttggatgataatgtattgaaaaatcagataggtgtacaactctttggtactaaatttgaagatttggaagcggacgcagtaacagcgctaacaaatattgaaggaagtataagcagttcaaaagataaattagaagaaattaataagataaaatataatagcttcggagaagcagtaacgggaattggaaggcaaatgcaggttaatttacttcttccaatcgcagaaggattgcttcctgttttaaatgatttagcaaataaatttgctaaggcttttcagaatgagaatactaaaaatgctataagaagtacagcagaaagtattggcgggctaattggaacagttgtaaaattaatatctttagcattaacccctttaatcaatgttataacctttttggttcagcatggtagccttgtagcacccttaatagcaggaattggagttgcttttacaagtcttaaagtagctgggattgtgaggggtatacaaaaaagttttacagatgcccagttggcggtaagaattttcacatctggcgtgactgagtcagaaactaaattgactttgtatcaaatggtagttggattggttaccaaaaaaataagtttggcgcaagttgctaccaatctgtggaaaggagcattaactgcgcttggtggtccagttggcttaactatagttgcggtaactgcattaacggcggtcgttgtttctttatggaaaaataacgaagctttcagagacgcggttataaaaatttggaacaatattaaagacgctggagctaaaatatttggtcagattgctaaattctttacagaaacaataccacaagcactaagtaaggctatatcctttattaaagataattggcaaggattattgctaatgctggttaatccttttgttggagcttttaagctgatttatgataattgcgaaagctttagaaataaagtaaattctatatttaacaaaatcattggtatctttaaaaatgttttaaactttattaaaaacaactggaaaaatataggaagcatgttattaagtccttttgtaaatgcatttaaagctatttataatagttgtgtaaattttaaaaataaggtttttagctttttctctaatgttgtaaaaggcttcgctacttttggaaaaaatataatagttggaataataaacggactttcgagcggtatcggcttggttgtagatactgtaaaaaatatcggtttaattgtagtcaatacatttaaaaaagtgctacgaatacattcaccgtccaaagttacaacagagcttggagagtttgcaggtattggttttgctaatggtataaaaaatacaagcaaagatgtagtagaagcaacaaaagaattaataagcgctatggaaaaaaatctcgataccaataaaagcaaatttgaaaaaatttgcgaggctataacaacagcattaaaaaatcaatacgaaagtcaaaaagatatacaaataaaagcgcttgatgaaagactaaaagttgaggaaaaggcatcaaatgatagattaaaggtctatgaaaaagaatacaatgagaaattaaagtatttagatacagaaacaaatgagaaaactaatgctatacaagaacaaattgacgccatagacaagcaaattgaagaagaacaaaaagcagaagaagagaaagcgtacaatgaaaaaataagcgaccttgacaggaaactagcaacagctaaaaatcaaaaagaacgagaaaaaatacaaaaagaaatatcagaagcacaatcagatagacagaagaaattattagatgaacaaaggcaacaagaaaaaaacagattaaaagaacagattgaaaatataaaaacagaagctagtaacaaaaaagagcagtacaaagaagagtacgacaatcaaaaagaagcagaaagtaaaaaacttgaattgataaaagagtctaatgctagtcaaaaagaagaaattgaaaaatattttagtgaacttttagaagagacaaatattcaaaatgaagcgagaaggctacttttacaaaaaaattcagaagaaattataaaacttttaagtgaatataacccgcattggcaggatgcagggcagagtttagcagatagtttgttaaatggagttaactctaaaaagcaatctatccaggaagctgtaaaggaagctattaacttaaaagagattataccagcacaagaaaaagagcttgatagattgaagaaaaagttagaagaatatgagaaactaaaagaaaaagctaatacttctagcgcaagtggaggggatgtagactcatctgctaaaagttcctctttggattctggttctgccaaactggacgctggagaactagaagaatatgctgatggcatagatgatgttaaaacttctgttgaaggcttagaacttgtcagtgatgaactcgtaacaggaacagtccctaaagttggggattcagctagtaaattatctgaaagtataaaaaaagggttcaatggcattggtggtttttttggtggaatagaaaaatggctaagagatacagacaaaaatataaatgagtggctagctagtgcaaaaaattctattggtgatttcttctctaaagtaaaagataaattcaaagaaggaattgaaaatataggtggattttttggtggtcttggaaataaaataagtgaaggatttgcaggagctggagacttttttacagagtttggagataaggcacagcaaggtttttcaagtataaaagataaagctgtagagattttcggcggtcttagcaattggttcaaagagactgggtcaaaaattggagatgcaattggaagcggattaaaaagtggtttagacttttttactagcacagtaccaaaatggtttgcgggtattggcgacaagataaaagaagaatgtgggaaaataggagaaaaaatatcaagtttctttaatgagacaatgccagctataataaataatattgtcgaatggtttaaacaaattccatataatattggttttgtaatcgggtctattgctggttttttcgttgatttaggagctaatctgtacgcctgggcaacagaaacattaccagaaataataaatagcattgtcgaatggtttgtaagccttccggaaaaaatttcggaattttttagtatcatattgcaaaatattcaaacttggggcgaaaatttcaaggtttctgtttcagagttttttggtgcaatttgggaaaatataacacagttttttacagagctacccgaaagaatttcggaatggtttaatacagtagtagaaacaataagtggctggggcgaaaatttaaagcaattggcaacagatatttttaatcaatttgttgacaatgtattaattccaatttcggagcttccgggaaaattatgggaaaagtttacagatatcatgggaaaagtttcggaatggggttctaatctaattcaaaaagcattagaaacaggaagcaaattcttagaaaatataatgaaattcttttcagaacttccgggcaaaatatgggaaaaattaactaatataatgcaaaaagtcatggagtgggaagttaatttatctaaaaaagctttagaaacagcgaaaaacttttttaacaatatatacaatactgttagccagcttccaggaaaatttagagaatggctagacaatatcatttcaaatgtcataagctgggggactaacttagtcaaacaagctggagaagctggaaaaaatatggcaaatgctgttaaggatgctttgaaagatttgcctagtaaaattatgagtatcgggaaagatgttgtaagaggcttatgggaaggtataacgggcatgggtggctggttaaaagaccaagtccttgattttgctagtaatgttatagatggatttagagacggctttggagtgcattcaccttccataatcatgcgagatttaattggtagaaatcttgtaaaaggggtcggcgttggaatagatgtagaaacgccaggcttgaaagaaaaaatagagaaaaatatatctgaacttacaggtaaattaaaagctacagttaattttgaaacgtctaaaatacaagctaatatagttgcaagtacagattttaaagctggaaaagaaacagctataatgagtaataataaggctgatgaagctaatgaaaatcaagcaggtattaaacttaatatagaaaactttgtaaataatagacaacaagatatagaaaatctttttgatgaaatattgttcttagcaaaaagaaaaggagctttataaaatgttccttttcttttttatatttccttttatcttttttgaaaagactatagtaaaaaatataactacaaaaacggagttatgtctaaaaaataataaatgagaggagggcataaagctatgtttttcgtttataacggtcgagacagcagagaatttggtttaaaaatatacaatataaacgacttatcagctccacagatggaagttgaaagagtgagtgtgccaggcaaagatggagatttactactaaaaaaaggttttgaaaattttacgcttacaatagaatgcgatatagatgcaagacaaagtaatatagaagaagttgcaacagaaataaaaaaatggctacagggcgatatatcatataaaaaactttttttaagtaatagtgacttttattatctagcaagctgtaacaataaactagatataactagaaattttaaaaactttgcatcatgtcttttaacattcgactgctacccttttagatacgcagaagaagaaattataagtttaaatgtattaaatctaaagagtgctactataacaaatttctatagagagtcaaaacctgttctctatatagaaggagcaggggacataagtataaaaataaatactcaaagcatagtgctaagaggggtggcagaaaatggaattttaagcgacttaataatagatagcgaacagatgaatgtatatagaataaacaaagaaaataacattattgtaaatgaaaataataagctttttagtgactttcccatacttgaagaaggagaaaatcagattagctgggaaggggatataaaaagcataaaaataaatcctagatggaatattttataaagttttaaattaaaatttggagggagggattaattattcaaaaaggaaaattagttttatatgaagaaaaagaaacagattttaggcatttaggtttaggtgttcttacgaatgtaataaatgaccatgttagagaggaagaaagcggagttttcgagttagaatttactatctacgaagactcttttttatttaaagaaataaaagtagatagattaattaaagctgatacttcgcccgactacaaagaccagctttttagaatttattatatatcaaaaaatctaggtgggtatattaatgtaaaagcgcaacacattaagtatgatttgcttaataatttcatagaaagtttggaattgaacgatattacttgcgaagaagctttagaaagagtctttcgtgcttgtgaggaacagaacagatttagaggacattcagacatcaaggcaaggaatactattaatattgaaatgcaaagcccttacagcgcaatctgcgagggcgaaaattctctaattcaaaaatttgaaccaactgcgaaacttttctttgataattttaatgttttcttaaattatcaaagaggtgagagtaaaaatgtgctacttgcatataaaaaaaatataacagggcttgaagcggagtatgatacacaagatattgtaacaaaaatatatccttatgcggtctacgaagatgaaatgattacattgacagaaaaatacattgttagtcctaatatgaataaatatgctacccaaaagattgttgctatagattttagttctgatgaggtcagtgttgaagaagaattaagagaaaaatgcaaagactattttaaatacaatcaagttgatttaccaaaagttttatacaaagtcaacttcgtagatttatctacaactataaattataaagattacaaaatgctagaaacagtcaatctaggtgatgaagtgataatacgagattttaatttaaacattaacgcaactgctagagtagttaaaacagactatagcccaataaatcgaaaatactatagtattgaagttggcgatttaataaatcatttagactttttaaataacaagtttaataatatagaaaataaaatagaaacagtaaaaaaagctattgataatgtcaaagtagatgattcagagtttccagacactttaccgaatacaccagctttgacagcagaggggttattcgcttttatcaatctaacatggacatttacaaataagtcttattacaaatatgaagtttatgcgtctcaaattaaagactttgtaccagatacaattaattttacaaatcgaatttttgtagggcaagcaagtgcttacgttcatcaagctgaaccttttcaaacttggtatttcagagtaagagcagtaaactcgcatggaaatgttacagagttctctaatcaagtagaagcacagactacaaaaatcgacgatggaactatgtggatagaaaaaggagcaatagcagatgcattaattggggagttgaagctagatagaggttggtttggacagctaaaaggcatgtatataaatgctagagaaatggtagtcgtaaatgataatggagtcaaaacaatggaaattgatagttttggagatgttcattttaacccaaatacttttaaaattgcttttaatagtgtaagtccttatgttcttattgatgatgaaggattgaaacttataagcgggaagggatttacaaaaatgaccgactcggggctatatacaaaattctacaccggttcagatgtaacagagtcatattatcttcaagaaagtggatacacatactttgattataaagattcaaaaatcataatagacttaccaaaaaaatttgcaggtaaaaattttaaagcaacttgtgcaataaggtctacatcaacaaatggtagctgtttaagttatttcagcacatcagcgacagcaaaaaaaagtgatacaaatccacaattggaactttctgcatctgtgcgaggtgtgtcttacgaaatgtcaggaagccaaacaataggctactggctcggaatgaattttttttcagaaggatttattacagtacaatactatgtttatgcttaaaattttcaaaaaaaaggagaagaagtatggttactattttttacagcaagagaactggagaaatatataattgcataaaatcagagatggagcaggattatacctgctttgcagatagggaagaggattataggcaaatattagataaaatagttgtcgaggatattccagaaattttaaatcctcgtgattataaaattgaaaacggaaaatttgtattaaaggaaaaagaaataataaaagaatttactccaaaaatggtagagtaaaaggagtgataaatttgagagatagaatttatacagtagatattaacactaaaagttaccaagttgcaaaatataagcaatatgataatgcaatagaatttaagattaatttattagaaaataatatagaaaaagatttgacaggatatacagctatagcaaattttcaaagaccagacgggaaaatagtttatcagagctgtactatagaaaattctattgcaacaactataatagaaaataacataacagaagttgcgggggatgtaatagtagagtttactttctacaaagatgatttagttgttactactttttctttaaagattaatatagagaaaagtatagataaaaacagtattacagaagaaccgaaatgggattatatcagcgttacaataaatcaagtaaaagaagtcgtcgaaggcatagaagaaataaaagaaacagaagaagcaagaaaagaagcagaaattaaaagagtcgaagaatttaatagtataaaagaaactttcgactctaaagttacagaagttacagacgctaaaaacagcatgattagtgatgttaatactactaaagatactctaactaaagaagttacagacactaagaatgacttaactaatgttgttactacagctaaagaaagtatgataagtgaagtaactacagttaaagaagaattagaaatcgcagaaggtaaaagggtcgaagaatttaatagtataaaagaaactttcgactctaaagttacagaagttacagacgctaaaaacagcatgattagtgatgttaatactactaaagatactctaactaaagaagttacagacactaagaatgacttaactaatgttgttactacagctaaagaaagtatgataagtgaagtaactacagttaaagaagaattagaaatcgcagaaggtaaaagggtcgaagaatttaatagtataaaagaaactttcgactctaaagttacagaagttacagacgctaaaaacagcatgattagtgatgttaatactactaaaacaacattaatagacgaagttaacacagttaaagcggaagttacaacagctaaaaatactatgattagcgaagtaactacagctaaagaaactatgcagacagaagttacagacgctattaatgcaatccccacaaaagaagagttaaaaggggtaggaatagaaataaaaggaagtttagataatatatcagcacttccagtcaatccaactttaagtgatgcttactttgtaaaaagcgcaacaatagaaaaccaaattgatttatatgtttgggacaacactaattgggtcaaagttcctgacataaaaataaagggtgaaaatggagatggcttagaatttaattgggatggcacgcgactaggtataaggatagaaggacaggagaattatacttatacagatttaaaaggtcaaaaaggcgataaaggtgatagtattgaatttaattggaatggcacacgattaggtataaagatagaaggtcaagaaaattatagttatacagaattgaaaggggagcagggttatactccaacaataggagaaaatggaaactggtggattaataatatagatacccaaaaaccagctagaggggcatctttgaggattttaggaaaattagattctatagataacttaccattagaccctactatcggagattgctggattatagggagaaatatttatatatatcaaactaaatgggaagacttaggttctctagcgggcgtggacggcaagaacctagaatttaattgggatggcacacagttaggcgttaggcaacaatacgaattagattataagtatatagacctcaaaggtgacaatatcgaatttgcatgggatggcacacgactaggtgtaaggatagaaggacaggagaattatacttatacagatttgaaaggtcaaaaaggcgatagcattgaatttagttgggatggtacggagctaggcgttagaatagaaggtcaagaggactatagctatacaaatctaaaaggagcgacaggaaataaattagaatttaattggaatggaagtcagctaggtattagagaagaaggacaaacggaatatatatatacagagcttagaggggaacaaggttatactccagcaatcggcgaaaacggtaattggtttataaatggagaagacacggggaaagcgtcaaaaggaaaagttacatggaatgagttattagaaaaaccgaaagagttagattacattaaaaaaagcacgacttttaattcagacggctctataacagatattttagactcggttagtaaaactataactaaatttaatgcagatgggactatagtagacgaaaaatatatagataatgtattagtaagtaaagtaaaaacgacttttaaaggtaatcaaatagaagaaataaaagaagaggtgagttaatgagttgggcggagacatacaaagtgaatagtgacttgcaaggcgagccactaaattttttaagttatttgcaagacataaaactaaatggattagatagttatgtgctgtttattggaaatgctaggatatgggaagaattatatttaaatagtttatatttattttctgatagaggaataagagaaacagtttacacagctttttcagaaactgatattgataatttatttaataaaagcactaagctaggggaacaattaaatgccttttatagaacagatatatttagcttaggaaatgctgataatgtagtaaaagaaatgactatagagcattataattcattagaggaaaaatttaaagcagggtatgatagatatgttacaagagaacaagaaaagtcaactataggagcatggtttaattctacttttagcttagataatactgatttagaaaatcttacaactatagaagaaatattagcaaatgtggaagctactaatgcaatacttaataatagtaatgcaatagtagctttaactatgtgtaaatcaagcatggacgcagttgtagcaagttcaaatgctatggatttattaggtcaatatattttaagagttacaacagagtcaccagtcattagagcaattttaaaaaataatgtgattagggatgcgattataaatagtgatgaagctatgacacaaatttcaagtaacgaaaactccgtaatggaaatatttaatgacttagaagctacaaaagtattagtgcaaaaccaaaatagcataaataaaatattaactaataatgttactgttgaaaaaataatccctaatttattagaaatgaagtataatttacaaacttctttaaattatataaatacaataaaatcaaatattgcttctggtaaaggtcaaattatggcaataacttataatgaagaaatattcccgattttaaaaaatgcagtaaaaaattatgatggtatggaaaccacacgtaatatatcacaacgagatattgaggaaaaaataaaaatttcggatgcaattttagaaagttcaatcgcaatggcaacttttgcaaataattctattatagtaaataaagttggtgaccgagtgggaattatagaaagtattttcagtaaaacagtgtcattaaatgcttttatgaaaagtacaacagctataaatattttagtaaataaaactactgcttttactaagatagcaaataactctactgctttcaatgctatgctcactatttcagaaaataacgttactattgcaaataatacaacagcaatgggcataattgcaaataacgcacaagctatgtcgacagttgcaaataacgatacgtctataagtgtttttgtaaataatacaacagcaatgggcataattgcaaatagctcaacggctatgaccaaaataacacttacaggacttgcacttaacagaatggttaaaagtaatacagctaaaagcatattaattagcaaaaattcaactttacaaacttacaaaaataatatacagaacacaatacaaggaagtactgcttattttagaactatcacaggctttgcggatgctgatgataacccaccgcaaactattaatagtacttatgtaggcataacttattgttatggatataaaggtaatagttattatggaattgtgtatcatggctacaatacaagtatagaagcaggcagaggaaatggctataaagatgaaaccaaaaagtttataacattaggcggggctagatatgaccaaagcggagacggttattttacttacgcaatgtatcaagcaatttaatgtttataagtcatctaaaagattagattaatagtctaatctttttttatataaaaaataaataatcaaaattaggaggaaagttatggaagaattaataacacaactaagtggactaggagcagtagggatattatgcgctttgctgttcaaaaacactatgcaggagaaaaaagaagatagagatatgtataaaaaaacagtagaaaatttcatagaactatctacacagcaacaagagataaataagaatatacttgttgaaatgggagcaatgaaaacggacgtagaagaaatcaaagaagatgtaacagacataaaagacatgttacagaaagaaggtctttaaatgagagtagcactaacagcagggcatacgctaacaggaaaaggaacaggagcaacagggtatataaatgaaggaacagaaaataggatattgatggatttggttgttaaatggcttaaaaagggtggggctactgtgtatagtggtaaggtagataagtctaataactacttagcagagcaatgtcaaatagccaataagcaaaatgtagatgtagctgtacaaatacattttaacgctgaccatacgacattaaatgtcatgggtacagagacgatatataaaactaataatggtaaggtatatgccgaaagagtcaacgagaaactagcaacaatatttaaaaatagaggcgcaaaatcggacgcaagaggtctttactggcttagtcatacaaaagctccagcgatattaatagaagtgtgtttcgtagatagtaaagcagatacagactattatattagacataaagacatagtcgctaagttaatagcagaaggtattttaaataagacaatagataataaagaaaatagtgaggataagaaaatgtataaacatacaatcgtttatgatggagaagttgacaaaatccccgcaactgtagttggctggggctataatgatggtaaaatattaatatgtgatataaaagattatgtaccaggtcagacacaaaatctttatgttgttgggggtggagcatgtgaaaagattggttctatgactaaagaaaaatttactatgataaagggtaatgataggtttgatacactttacaaggcactagattttattgatagatagattagaaggtagcaactagagttagttgttaccttcttttttttatgtctacttttctttcttcttccaaacaacttcgtatcctatcagattagcaatagtcaagatttcactatacttcatagtctcattatttattttttgtcttaaattctctactgtattattcttattattatattcattcattaaattatttaactcattcatgctgatattttctttcacaagaatacttttgatttcatttttccatgtcattttttcacacctctcttatttatataataacataaaaaaattaaaagtaaaagaataatctatgttaatcaaagttatatttttggaaatcaaagaaaaaactttgaaaaagtgttgacttagatattcatatagattataatataattaacaaataaaacaagggggtaagcaaagaatgaaaactttatttaaagaagcacataaaatagcaagagaaattaaagaaaaatataatgatgtagattataaagtacaatttagtctttgcttatccttcttaaataaaaagggggatataaaaatgaaagaattaaaagggtcagaaaaacaaattatttgggctaatgatataagaacagacattttaaatttaactaacgaactagaaaaaagtaaaatagaaagaataaaaaatgaagactacaaaatcaaagatatgagtatagaagaaatgacagaaagatgtaaaagaaaatttgaaagaataagagaagcaataagcaacatagaggatgctaagttctttatagataattttagaaatgttttaaaatataattctttaaatcaaaaagcgtttcaaataaaccagatttttcgagagtctcaatttacagaagaaattggaaatttaaaatttttaaaaggagaaactcaagcgtctcataaacttagaaaagttgaaggtagtataagctatgaagaagctaaaaaaatagctaaagaaataaattttaatgataattggtctaatgaaataaaagaaaatgtacttgaaatagttgaaatatttgacgacgcagtaaaacaagctactagcacagaatatatagagaaagctaaaaaatacataatagaaacattaatacaaaaaaatgcacaattttataaaaatggatttgcagacattaaaaagaagcagattgaaaactatagaaaaatagaaagtgctgaaagaaaaatagaaattgcataccaaatatttagagatggtgtagagtgttaaaaattttggattggtacaaatatagttcaccgtcgaatgctataattttaatatataaaataaatggaggattgaagtatgaatatagattttagtacaatattaaatttaaaagttaataaagagaatgttgaaatgatagaaaaagagattaataaaatcaacaatgatatatttgatataagtcttaaagattgtgcaaacagtcacgtgggaatcgttaaagaaacagttggaaaaagtttaaacattgaaacgtgggggcatggtgaaattaacagtagcataggaataagattgagatttaatttttattattcaaaaggcgacaaagtagacatagaaaatatagaaaacattttaatatatgtaaatagcttatgcagcaaaaatgtagaaagtgaccttatagctagtgtaagacctggattttataaattagaagagaaatattctacacgcgttgaaaaatgcgaaattagacacgaatttacaggcataaacaaacaagaaattaaagaatttttagagtatcttacagaaattgaaaagagcgaaagaactgttatgtataaaaacaactaaaaaatggaggatataaaaaatgaataaacaaaaagctagaagatttttaagagttatagatatgaatatagataaaatagaggaagaagctataaaagcttttaaagaaagttgtttaatcaaagagactaataatataaaaatttatatcgatatacaaggaaaagttgaagcgatagcagttcaaacttgggctaaacttttaggtgatgacaaagaaattaatattttcacattaaatcaagcgccaactcatttaaacgatatgcttggagaaatttgttacgtaaacgattatgaagaatttgaaaattggtgtgaaaatgagtgggaaaatttggattgggatagttataaaaaattcaataaagaaaatttcgaagaaattgctgaaagaaatatagacgatagcacatcagtttttttagaagaattacaaaaaggcattgaaagttgtaaacaagaattgcaaaatgtaattgaaaattaagtagaagagtattattattaatgtatatagtatcgcttttaagattaactacgagggatttaaaatattttttaatttatttagaaataatattgtaataagaattttaagattaactatgagggatttaaatgtcaatttaatttatatagaaataatataatatccaattttagattaactatgcggaaataaaaacagtgtattcaataaatacactgttttttaatgtttagttattatgataacttaatccttcgattataaatcctacattcgttgtcatctctaattcgttacttaacattattccttgtgtaaattcattgtcagctggcaatgttactctttttctagcaattgcttctataattgtttgaaatagtttaattttcatatcattatcatgtccagcgaatcgtagataattcgttacttcttgcgaaaacttattcaactccgatttagtcattttttcagataactcttttccaatttgcagataaacgttcatcttttccaacccctttttagattatagttaaaacatattatttaaacaatattaatatattgtaataataatattaaaatattacttaaatattatatatacaatatttaagtaatatctaaacaatataaatataatattatttactttttcttagtcttatttcttctatttctctcattgtatatatttaaattctcttcttttatagtgacatcagataaaatttgagttagtatatcacttaataatttactaacgtcgctgttcatatcaatagaaaaagattttaatttgtttacaagctcctcatcaagcgttgcactcatagtcacttttttacttttcttattaactagattatatatgtttaatgtcttattgtctgtagttgtagaatcattttgtacgattgttccatttttcaaaatcggtttttctttatcaactaaaaggtctctgttgaaacttggcatctataacactccttttcttttcaattcttctaacatattagtaaattcctgtctgctgaaatgctctttagttatttttgtataatctgttagagatagtttttttaatagtgccttctctataaactcattttttctaatgtatgtatctaacataatatctctcatatcgttaaacccttccagataagaatcgaaagtatcgctaatttgagttttcttcttctcaaatccaactaaaatagtactttttatattatcctccttatcaaaataggttctatcaacatcccagagttgtttaaataattctgctcctcttaaagaagaaatgtttttatcttgaattggaataattatactatctgctaagaaaagcacatttttagctgtcaaatcgtagcgtggagataaatcacagataatataatcatactcactcaaagtattaaagttttgcatgtaccagcgagctaaaaatttttctctggctggtaaaggtgatagctcttgttcaaatctagccatttgtatgtcagaaggaattaagtctacattaatgtaattttcattaggtgacttgactattgcatcattagcactaatcccttttaaaatatctaatgtagtattatcattatgatttatttcataaacatattgtgttagatttgcttgcacatctaagtcccataagagtatttttttatctttatctttcgcaagttcatacgctgtcattatagacgttgttgtcttatagatacctccttttatgttaaagtacgtaagtagctttgtattagccattttctccacctcattattatatttataatattataataatattgtagtattgtttttataatattgcaacaatatattaatattgttaattacaatattcaaataatataaatacaatatttacatattgcttttacaataccaatatattatattaaaaatactaaaatattgtatatacaatactaaaataatatttttataatattacagtaatatttttatattatagtaaaatttaaaaaaaagaaggctaagaaaaaaagcaaccttcttttatagaaaaagtcattcattcttagccttttcaattattatcctgtcgccctcgaatgttgccgtaacattagggttttctcttgttatgcccatttcatcagcccattttttaggaacactcattctaggagtaaacgacccactcccacctttgtgaaagttaaactttaaatctcttttttctttttccattcattagctccttttttgctgtattacaaagaaaagcaataatacaacactaaaaactaaaccgagcatgttgcttgtactagagtttaatactatagatactatatttaagactatagttatcaaaactaaaacaatgcaaatcttataaaatttatcactcatgtttttttagaaatgtgttataatattagaaagaagtcacctagagagaagggctattccctctaggcttatccttacagttctttcaaaattcttagaactgcgaggattatgttaagtaataataggatgaaggagaaaacttttttaactatgttaaatttgttttctcttttctttttacttctttctaatctccccattcccgttcctcctttcttttatttttttgctttctcacctccttctctataaatatattataccatgacgggtcgtcaaaaacaatagttttctcctattttttaaacaaattttggtaaaaagtaaagattttagtatattagaaatgatgtaaaattgtatctttttttaaaaaatgtgatataataaaagcaaggaaataatgatttactttacacaagagtagctatttccaatgttttgaaaaataacttattttcttaaaccactcttattggcgtttgagtggttttttaattttatcgttcttaaaataaactttgataaaaataaaaaaaatagaatactgaaaatgatgtaaagttgtatcttttaaagaaaatgtgatataataaaagcaagagaactgtattctagtcataagagtagagttttagtctaaaataaaaaattatttaaactttttgaatttgattctcaaatcaaattcccaaccactcttttgcgcagagtggttttttacttgtctaaataatttgctaattatatagaatattaaactagctataacaccagctaatacattaagtaaaaaattatccatacttcatcacctccctttgtagcgttgggaggataatcttttgtgtatagactccactctttttttagaatatagattgctttctcttgctaaaattattataacatatatttacataaaaaaagacttagtttatatactaagtcttttaaaatgcagtattttagaaaatatatttttaaaatataatttattttcaaaaagagtatatttttttataatttaaatgtgctataattataatcacaacgaacagaaaacttttttttaattggtttaaaaaaatctacaaaaaaataaacaaggaacatgtacttgccgtcaaacaaaccatgttccttacaccggaggttagacctctcttaaggataatatatccttgtttttctatacttatatttatattataagacaaagtgtagaaaaacacaatggttttaaggtaattttaatagtaaaattattacaaaaaatcaaaaaaagagcgtcagcctccaggtggaaattggagggataaagatgaagaatgttaataaaaataatatagataagatgtttttagaagaatgtagcgctgaaagagcagagcatgaaaaagaaaattattcaaatttcaatagacatgaaacatatgaaataaaaaaatatataaacgaaaaaaaactaggaattaaaacggctatagccaacgcgataaatggcgggaaaaccctgtttattgcaccgacaggagcaggaaaaagttatagctttataaatacattaaaaaaattaaaaacaaaagcgttattcatacttccaaatgcttcaaatgtggagcaggcaatgcacgagtatgatataccaggagcatatgacaaaatacctgttagcgaagcatttaaaaatggtaacttagttgtaatgacttgggataaaactgaaaaacttataaacacagacttaagtgaatacataattgtagttgatgaaatacatcaaacttatacagatgcatatcgaggaaaagcaataaaaaatctaaataatataatgtctaagtgcaaaggaagaatagacattacagcaacaccaacaaaacttgaatttgaaatatatgactacataatagagtacactcaaaagcaaaaaacagaatataaagttaaattgtacaacgactttgacaataaaaattttactgaaatgattaacataataaataaatctaaaaacagcgccatgttgatgaatgatatatcaacattagaatttataagagattcagtgaacaaaaaagttggagttgtatatgcagatggaaaagaagagaatgaattgtacaatagaatagttaaaaattcagacatgaaagactatgaaacgcttttaaatacaacaacaatcctagctggtgtaaatataaacaacaaagatatcacagatataattattgttaatataaaagatgttggagctataaaacagtatgttgcaaggtttagaaacttaaaaaaagtaaatgtacacatattcaataaatatgaagaagagtgcaatgtatacaaaattgaatggctagttaacaaaaatatagaaaaagcaactatcttaaaagatgcttataacaaagtatctaaacacatgttacagtttgaaacagttggaataaatgcaacgccaattcgcatagactcaaatgtgtactactgtacaaaagataattgctataaagtagataaattatatataaaaagtcaagtttacagcaactattacaatacaagaacaattcaaagttttaaagtgttattagaagaatattttgaaaatgttaatataactgatgctaaagaagttggcacaaatgaaaaagagttaaaagagtacaagaaagttgtaaaagaaattaaagatgcaacaagagaaattttaaaagaacataaagaaattctagtaggttatagacagattaaaagcgattctaagagcttttcactaatgcagtatcataatgatatgaaactaagttcaaaagggtgcttagaggcttacagagcgtatgacatacataatttggtaaagaaaagtaaaagtaatagcatgttagaactatattctaattatgtactagataataagttcgacttagaccttgcttggaaactagcgaatgcagcaaacaaaagacgtggggtaatatttaataaaataaatactttaatatatagagaattaaaagaggaatatccagagtttttaaatgatgaacttattcaagttacagtatttaattatatagataaattgtttggaattggaacatcttataaagaattgcatttacaagagttaagtaacgacttaagaacaattttaggggaaaactgggatttaacaactaaaaagctaagcgttacactgaatggaatttttattatagaaaagaaaaaatatagtaactggcatgatatagaaactatgtttttttataaaaatataaatcctatatcatgccagtttgaaaaaaaacgaatacaacttaataatataaaaagatatataactgtagatgacataaaaaaagatttagaattagacgaaaaagataagagtttagaaaatgctataaaatatacaaaagacaggatgttgaactctttagatgaagatgaaaaactattgttattaaaaggttttatgtagagacaaaaataaatttcaaaaatatttacataaggagataaaaaggatgtttgaattagatattaaagttaaaaataaatatatagtgagtgtgagttatgagttttcagagcttttaatacgagcttttaatgactatgataatttcataaaagatataaaaaataaagataaatttatacctataggcattaatcttggatacagagaattgttagaagaaaattcggcatatcatgagtataatttttattatgatgaagaagttgataagtacttttttgaacttcaatatcaagaacaggatttaagggaggagctttcaaaacaacttttactagaacttataaaaattaatttaccagctggggcagaattaattgtagttgattaaaattgtatttaatcaaaaagaaacagaatcaaaagaacaattagaaatttgcatctaaaaacaaaaagtcagtcgacctggaatatatatatatatatatattccaggtcgactgactttttgataatgagtcatcaattaaaataaacataattagcatacaatatttaaagaaatgctataaaaactagaaaacagaggttattgagtaaattagatgaaattgaaaaggcatttttaaacaatgaatttgacataggatttaaaattgaaaaagaaatagagttagtagagcaactagaaatttgcatctaagaacaaaaagtcacgcaagtaggatttaatatatatatatatatatattcctacttgcgtgactttttgatgtgaaaatataaaacttataccaaatggaaaatcgcaaggttaaaaaaattgaccctgaactttcctaatgtaagaaaattcaatgtattttgaattggaattattttccactagcaaaatttgataaaaggtactattattgtagtataaatgtttaattgcgacaaaaaatcgtacatgtgttcttgtaatatcgaacaaaagggggtataattaaaattgtaagttatttttttacaaattttaagaatgtattattctacttgcatatagggggatgatttggttgaaagaagaaataaaagaaatgttggacaaagtaggggataaggatatattagagattatttatctgtatttaaagcaaaaaactaaaaaataaatatgtacatatgaaaagactatcaaatttaagatgatagccttttattctttttgaaataattctagtagcttttccattgcctctaattctttgtcatttaacttgctaaattttaacattgctttagcaagacgttcattcttatctattgcgcataagacttctgctgttattaagttattgtttgaaaaagtatacatatcgccttcgcctgtttttagccatttttcgtttaccttaaatgttgaagttattaattttaaatcactttcttttattcgtgttcttccactttcaagattgtaaatttcgtgtctagtcattcctagcttgttcccaaattcgatttgagatagcccctctgcaattcgcaagtctctaattctagtattcattttaaaactcctttcatagcttaattttacagtaaagttgcccgtaagtcaacgcaaaaaaacgcattggggcgtagtcttgcgaaaataaattagtaaaagttattgacttgccccttattacgcactataatataaatatattcgcaataggagtcaggaggttgtttctatgactagagaagaaagaattttaagaaatgcaattttgtacttagatatgagtgaggaaaagcaaagaatagttgactgtattttaaatgcaaagacaatagaaaacattgttgagaatgatattttagatgttaataaactaaatgaagcagtaaaagaaatagaacaaattatttgttaaaagcgtactttgacggctacgctaaaccaattaaaaaaagtaaaaaataaataaggaggctggaaaatgataaaagttattttatgtagtactatcgacgagtacattgaatatgaagatgtaataggagcaaaagacagctatttaatggatgttatcataggtggcgaatgttcagaaattgatgctatagaaactttagaaattttaaaaaatagtaaagcgagaattgtatcagaagcagaaaaaacttgtttaaaatttggtattggtaatcaaatttcaaaggcgatagaacaaggtataaaagagggttcaaaactaaaaaggaggatacattgtgataattgcggggcaatcgtagacagttcggaagaattgacctcaatgccagttttagaaaattataacaacaatcaatccgtttctgaccaactaggaagtatagatgtatgcccaaattgtttgctagaaataacagacttactgtaattccctgttttagttgaaaagaaacaaaaagtaacagcgtaagccgtcaataaaaagaaggggggtttaaaaagatgattaatttagaaacattgtgtaatggagaaacaaaagaaaagattgaaaatggattcatggagatatttaaaaacatacaagaccctaatacaccagcgacatctacaaggtctttgactgtaaaggttacactaaagccaggtaaaaatcgttctcatgttaatacgcaaatacaagttattccaaaactcgcaagtgtcttaccatctgaaacggacattatagttgaaaaggattttagaactggagaagttaatgcaaatgagtatggaaaccagttgccggggcaagtaaaattaggcgacttggagagtaaagaaacaagtgtaacagaagaaacagaagtaaaagaaagtgaagaagataatgttcgtaaatttaagagtttaaaagacttataaaaactaaaaaggagtgtttaatatgttaacagatttatttaacagggtaatggaagttggagcaagaaaaatagaaacaagagaaatcaatggggttacgtatacgactgaccccttgattgaggttcatcctagaccagctgaaatagttaggctaagcactttagatggtttaataggatatataaaatcaagtattgatagtaagcttaaaagtggaaaacttatggttcaagttgaaagccctaaaagtgttatattgtgttctgaactacttgaaagtggcaagagggatatttacattgaaagtagagctttattacctcatgttaatttcgattgttcgcttgatgcagagcaatttaacgttatgttgcaatcctctttcgtagatacagaagataagaaactgcttttaaaagtaagcggaaatgtaaaagaaacaagtgtaaaaactgtgcaagatgatggagtatcacaagtagtcacaatgtctacaggtgtagcaagtgtagaggatgtaatcctgcctaacagagttaagttaaaaccttacagaacttttgcggaagtagaccagcccgaaagtgaatttatctttagagtaaaagagggcattgcatttaagttaatcgaagcagatggtggagcatggagacttgaagcaataaaaaatataaaagagtacttagagaagaaattagaaggtattaaaaatatagatataatagcataaaaaattgaagaggctggactaaataaccagcctcttttaaaaaggagtgtttattttgtataaagatataacgaaaatgggagcaattgaacgtggggaatatgttggtaatgttgctcttgaattaaaagaagaaaatcctcatcttagtaaaatagatttaattgagttagctcttaagaaaataagagaggaaaaggaacaggaggctgggcaatgaaaataggtaaatacttaatcgtttcccaggagcaggtggatagaaatattgaatgtttgaaagaagaaaacaaagtaagggacgataagataaggtattatgagcgtattatgagtaacaatgaagaattgattcaaattttagaagaacagttgaaagagtataaaagtgaattagatgtatatagcttgtttatagattgtattttaaataaagaaacaaggaaagcgatagcgatttataacagaactaaaagcattagaattaagcaaaaatgtcttaattctatacctataaaaaagggttaagttgaatgaataatttccttgtaggaataaatgaggtgcttaaatatgagtgaatttgtgcagtgttgttgctgtgaaagaacaataaatatagaagaaaataaccatgtacagtatgaaaaagaggctctaggtttagtttttacactgtatttctgcttaaattgcgtagatgaattaagcgaaatggaataatttttaaatgacgaatggaggtatataaatatgaaaatgaaaaatgttttaaaactatcggcaatgtattgcttttgtccaaaatgtggaagtgatgaacttggagaaggtgaaggaagtttaatcgttgatgagtatacatttcatagaaagtgtaaatgtggatttgacattatagtagatgaaaggaatgacgaaatataatgatttttttaggaatgataattttgattatatttgcattttttattggtcgtatatatgaatatagagttaatttaagagaatgtgagaattgtaaggggggaggttggaaatgaataacactacactaattggtagactaacaagagaccccgaattgaaatatataccaggttctggaacagctgtatctacttttacaatagcagtagatagagattatgttaaaaaagatggaactaaggaaactgatttcatacctattgaggtgatggggaagttagcagaagtatgtgctaataatttagataaaggtaggttagtagcggttgaagggtctataagggttaatctttatgaaaaagatggcgagaaaagaacttatacaaaagttcatactaataaaattaaatttttagattataaaaaaagaggataatgaaaaagaatgtaagttcgagccgggaggcttagacccgcaaggtttccaggctatagacgacgatatacctttttaagtaggtgattaaatgattaaaaaagtagaaaaaatttttagtggttcagttaatctgaattttatggaagatgacctaacttttaaaaattatttagcgttatattgttgcataaaaccggttaaagttcatggaaataaaaaggttttggctagttctactaaggcatgtagtgcattgaaaattagagagcatcagaaaaaagaacgtaaaaaggtaagacttgtaaatgcaaaaacaggtgaaataaaagaaatggctatagatgaagcagaaaattttttaaatgttaaagatttgtaccctgtaattcggagaggaagacctacaagaactggctggtatgtaaaggatgttagcaatgaagaaagatattaaatacaatgttatatattttaattcaagaactttaagaatggataaagaaagttttagcactttaatagatgctagagtttgcaaaaatgaaaagataaaagaatatgaaaatgttgaaattattaaaaagacaattatagaaaaattgatggtataggaagtgaatttatggcaaaaaagaaaaggatttgttcatggtgcggtaagtcattttttacagagtcaaaaaacggattttgctgtaaatcatgcgaaagaaagtataaaaaagacaaagaaaaaaacgtaagttcttgcttagttgaagaaaccaaagaatatttaattgaacttggaaataagaaaagaagagtagatattctaagaaaagagatagattttttaaaagataaagaattttatagagagataaatttcaatgaactagggtttaaaatacattctagcccgaagggcatagatgaaatgattatgaataatgaggataaaatatcatttaaagaaagtgaaattgattttatagaatatagattgagactaatggatatttacataagtgaacttacagaagagaagcaacaaattataaaatttatgtatttttatgatggcgcaagtaaactttctaatgaagaaattgcctcaaagattaaatgtagtcgcagtaatgttcattataaacacaaggaagcattgaaagaacttgccgaaatgctttttgaaagtggaagtcttttgtagaacgaaaaaagacggtttttaagacaaagttagaacactcttttacgtttatatagtgtatgatattaatatcaagaagtttaaatttaaatagatatagatttgaagcctggcaggaatgttgggctttttataatgcaaattaatattttaagggggttgagaaggtgaatagaagtgggtagtaagaaaccagctaacccaatcaaagacaaacgtatggtcttaaatatacaagaatacttaaaagaaaagagtgttagaaattatgttttatttgtcttaggggtggctacgggctatagagcaggggatttagttaagttacaggtaagggacgttagaaatgcaatagacgaaggttatttcttaataatggagagtaaaaaagaaaagactaagaacataagaaagaaaaataaaaaacctagaaaagctccaatagttcctaatttagaaagagtactcaaaagctacatacgagataaaaaggattatgaatatatgttcccatccaggcaaaaatctgttactccgcatataggtgttgagagagtaacagtgatactgaaagaagcaggtagatactttggacttaagcatataacagcgcatagcatgcgtaaaacatacgctcgcaccatatacgaagaaagtggatttgacattataagagttaaggaaatgcttggacattctagtatagaagaaactaaggcatatctaggtcttaatgaagaacaatatcaagaatatagcatgtttttaaatgacctaatagggtgattttttttattttgtctttttgaatgtgggaaaaataaaggcttatatattcaatacatttttttcgctatatataaagtaggaaaagtaaaaagtgaatgtctgattctctaagaaaaccccatattcgttaaaataggcgttagccattataaatactgggatagaagctatttaacgttaaaatgggtatggtgaagcttaaggacatgcggacaaaacttaaaggacatggaaaaatagagaatgagattgatgtaataaaaactataaaattcacaggcaaacaattcaattacgcccttttacaagagtaatgacaatatttataagtacttttgattcatttaaaaaaattcactcgtattcataactgtacggtattgactacgatttaattatgtagtaaaatgaacatatagaaagtagtcataactaatggtcaaaagtaaggggtgtatttttatgatatttgggtattgtcgggtaagtagtaaagtacaaattgataataatagtttagaacagcaggagcaggaaataaaaagacattatagtgatgctaaaatatttagggaacaacatacagggtcaaccacgcacagacctatttttgaggaaatggttaatcaaatgcgtgatggtgataaattagttgtaactaaattggatagacttgcaagaaatgcaacagaaggcattaatcttatacaaaatttatttgatagtggtatttctgttcatgtgcttaatgttgggcttttagaaaatactactcttggcaagttttttataacaaccttgcttgcagttgcagaaatggaaaggaatctaattttagaacgaacttttgcaggtaaggagatagcaaagcaaaatcctaatttccgggaaggtagacctaaaaaatatactaagatgcaaatggaacatgctttagagttattaaaaactaattcttatacgcaagtagagaaaatgacagggattagtaagagtacattgcaaagagcaaagcgaaaacaagaagactag

SEQ ID NO: 6 - DNA, 53549 bp, synthetic construct
  source 1..53549: mol_type = other DNA
aagtcttgtttatgtccgattaatgaccgattaatgattgatttagtatagaaacatgtcacataaacatactatgagataagatataatggtagtatgaaacaagtgtataaatatatcccctaaaaaagactaagttatctcgacttggtcttttttatatttaaaacaaagtgaggtggtgatgtggctaaattaactgaaaaacaaaagcggttttgtgactattatattgagactggtaatgcaacagaagcagcaataagagcaggatatagtgaaaagacggctaaggtaataggtgctgagaacttaacaaaaccatacttaaaaagttacattgatgaaaaactaaaagaatttgagtcaaacaggatagcagacgcaaaagaagttatggagtatttaactaagatagtaagaaatgaagcaaaagaggaagtggttgtagtttctgaatatggtccagaaataataaaaaaagacgtaagtataagagataggaacaaagctgctgaattattaggtaagaggtataggttgttcaccgataaggtagaagttgaaggagctattcctatagttataactggagatgatgaaattgaagattaagaaaataaatatagcaaagctagtaggtaaggggtataaagactattggagatttaagggtcgttatagagtctgtaaaggttcaagagcttctaaaaaatcaaagacaacagctttatattatattactaagttaatgcaacatccagaagctaatttattagttgtgaggaaagtgtttggaacattaagagatagttgctataaggaactcaaatgggctatacatcagttaggagtagataattattgggatagtacaactaatccacttgaaattacatatattcctacaggacaaaagatatactttagaggatttgatgacccacttaaaattacctctattactgttgatgttggagtactttgctggtgttggattgaagaagcttacgagataacagatgaaaatagttttaatatgttagatgaaagtataagaggtaaagttccaagtggattattcaaacaaataacaatgacctttaatccttggaatgagcaccattggattaaaaaaagattttttgatacaaaggataaggatatactttcaaagactactaattatctttgcaatgaatttttagatgatgcagataagaaagtgtttgaaactatgaaaaagaacaatccaaggcgttacaaggtagcagggcttggtgattggggtattgttgatggattagtatatgaaaactgggaagagagagtatttaatatagacactcttatagagcagaatatcaaatcagcttttgggatggactttggttatactaacgacccaacaactttattttgtggtttagtgaatgaaccttcaaaagagatttatgtatttgatgaaatatataaacatggtatgtctaatgagagactttatagagaagttagtaggaaaggatattctaaagaacatataacagcagattcagcttctccaaaagatatagaccatctaagagagttagggttaagaaatataaaaggttcaagaaaaggaaaagacagtgtaaataatggcattcaatatatacaagattacaagattataatacatcctaaatgtgtaaactttttaactgaaataagtaattatacttgggataaagataaatttggaaataagattaataaacctatagatgattttaaccatttaatggatgctatgagatatgcactggaagatttcataaaaggagaggtgtttagttttgattaatcttttaagaaagggggtagctaaactgaataatattctaaataaaccactaaaacaatcagcaaacaatttaaaatatatagagtatgaaataaataaatggaaaacatcaaactctagaaaagagcagttacaaggtgataggtattataaaggtgagcacgatattttaagacggaaacgtactgttattggagaaggcggaaagttaacagaagttgaaaatctaccaaataataaaatagtagataataaatatgctaatttagtagaccaaaaggttaattatttgctaggtaaaccacttacctttcaaactgagaatgaaatatataattctttattaaaggatatatttaataagaagtttcttaggacctttaaaaatctttgtgaagattctctaaatggtggtatatcatggttacacccatactatagtgaagatggtaaactaagtttcaaaaggtttccgtcatatgaagtattacctttttggaaagattcagagcatacaatattagattttgcagttagattatatgaagtaaaatcatatagtggagcaaacgaaaagataattgagaaagtagaagtttactcaaaggaaggtatcaagagatatattttacaaggaatgactttgatagttgactcagaaagtccatactcttcttatttagtggttgagactgatgatattcatgaggaacttaattgggataggataccattaataccatttaagtacaacaataaagaaataccacttattaaaagagttaagagtttacaggatggtataaatattatgttgtctgattttgagaacaatatgcaagaagatgctagaaatacaatactggtacttcaaaattatgatggtcaaaatctaggagagtttagaaaaaatctagcacagtatggagctgttaaagttcgtactgtagatggggcagtaggagacttaaaaacactagagataaaagtaaattctgataactataaatctatattagaagtatttaaaaaggcattaattgaaaatggtagaggatatgatgctaaagatgatagaatgagtggaaatccaaatcaaatgaatatacaaagtatgtatagcgatatagatttagatgctaatggtatggaaactgaatttcaagcttcctttgaagaactattgtggtttgtaaatatgcaccttttaaatactggtcaaggaaattatgaaaatgaagaagtagaagtaatctttaatcgagatatattaataaatgaaacagaaagtatttctaactgtcaaaattcagttgggttattatcagatgaaactattatatcccagcatccttggactatagatgttaggcaggaactagaaaagaagaaaaagcaggaagaagctcaaagagagtatgatgatttaattcctaataatcaagatggtgttatagatgaaacataaagattattggagaaagagatttgaacaattagaagaagctcaaaataacaaaagtgtaaaatattatcttgaattagaaaagcaatataaactagctatgaatagcatagaaaaagatatacttgtatggtataacagatttgccaaaaatgaaagaatatctttattagaagctaagaaattattaaatacaagagagctagaagagtttaagtggagtgttgaggaatatgtccgatatggtaaagaaaatgctattaaccaaaagtggatgaaagagttagaaaatgctagtgcaagggttcatataacgaggcttgaagctttaaaactacaaatacaacaacaagtagaagtgctttatggaaatgaacttgatagcattgataggttaatgagagatatttatacaagtggatattatcacacagcttttaatgttcaacaaggaataaatgttggttggagcttaatgtctttagatactaataaaataaataaagttatttctaagccatggaccagtgatgggttaaatttctcagaaagaatttggggtaaacatagacctgctttaatcaatgagttacacactaaattaactcaatcaattattagaggtgagaatcctaaaaaattagtcaatgactttgctaaaagatttaatgtatctaaatctcaagctaagaatttaataatgactgaatcagctttctttgcatcagcttctaggaaagattgtttcaatgatttagatgtagagaaatatgagatagttgccacattagatttaaaaacatcaaatatctgtagagaactagatggtaaagtatttgatatgaaagattataaagttggaataatagctccaccatttcattgccactgtagaactacaacagctccttggttcgaggatgaagaaggttacagagcagcaaaaggagaagatggaaaaacatatgatgtaccatctagtatgaagtatgatgagtggtataagaaatatattgaagatagacttggaaaagaaaaagctgatactcttagaaaaatgcaactaaatgagaataaagatagaaaacaatttaaggaatataaaaaagtattagaaaatgaaataccttctaaatttgatgaataccaacatatgaagtataatgatactataaggtatgaggaagctaaaaagctttataaagatgtaaattggcaagttaagaatcagagaaatttaactagtggaagtgttcattcagtgccatttgaatcaaaaccaaatagtgtatttgataattacaaagatggtaaattaattcaaagaagatactatggtaatacaggaaaacctagattagatttagatttaactgaccatagaaacccaaagcaacataaaattgtacctcataaacatgattggttagctgatgaaaataaccatgataaggtaaaaagagagaaggatatggagcttacaaaggctcataaaatagctaacaaagatattttgaaaggagaataaaatggataataaatttaagaatttacaacatttaattgattctattgatttaggattagatgtagaatttgacttatataataaatcatataatatatctattggagatgatgatacaagatttattactctttgtcctgatggagatacaaagtattataaaaatggtaaagatatggttgataattgcaatattgatggtaaattactaaaggatttatggaaagatatacagatagtaaatatgtaaaggcacttacttaaatggtaaattagtaggtgcctttattatgtgaaaatttaaggaggaataaataatatggctaaatttgtgaagaaaccagttgaagtagaagcttttagattaggttatgatgatttaccaaaatggtttgttgggaatgatagagtttgtaattttatacaagaaaaatgtattggtggtaatgtgagttgtgacttagaaacattagaaggcactatgagagctaataaaggggattatatcatacaaggtgtaaaaggagaaatatatccttgtaaagcagatatatttgaaatgacatatcaaaaagttgaatataggggaaaaaataaattatcaacagagatgactttagattcaacaaactttcaagaaaatattaaaaatgccgcaaaggaattagagttttttatagaaactttagaaaaagcagatgataaaattgataaactaacagaaaaatgaataaatatgcttgtaaagttgatgtagataagattgtaaaacagttaatgaaacgcctaagagaagttattaaatagtttgaggagggttatattattgaaagagtatgtaatttggtttaagagtggaaattgtgtatctggaataacaaacgaagatgttactgataagttaatgaaagattttatggaagctgactcagattgtaggtatttgaaaggatatttagatgaagatggaacaataataatagatttatcacaaatagaagctatatcaataaatacttgtagtgataataataatattggttttagtaagtcctagatagggcttttttattttgtaaaaaatgaaaggagacatttaaaatggattggttaaaagaattgctagaaggaataaaaatagaggataacaagattgatgtagcttctttacaaaagtctatagaaaagaaaataaaagagactacagttaccaaagaagaatatacaaatcttgaaacacaacttaatacagctaatgaaactattgaaggttttaagggagttatgacaaaacaggaagttgaacaattaaaagcaacttatgaagctgaaataaaacagataaggagggattctattgatgaaagattactaatagaaaatagagcaagaaataaaaaagcaacaaaggcattacttgaagatattgaggaagaagattatgaaaagtatgagtctttaagattagcacagattaagaaactacaacaaagtgaagaaagtaagtttttatttgaagaagttcaagaaacaaaagtaaattttagaggagtaaatccaggagaaagtaatcctatagcagaaaaagcaccaaaagattttacttatgaagattggtgtaatcaattagaaaattaaagaaaagaggtaaataaatatggcaaatacaaaatttgacgcaaaatcatttaatgcagaagcatttggaaagtatatggagtcagctccaacattaaagagaaatgaattattaaaatcgagagctttaaaatcaaactcagaaattagaaacttatttagtagccaaacaactacatcatatggaagaatacctatgtatggtaacttagaaggggatgcacttaactatgatggtatgactgatataacagcagatactactgttacctatgaaagaggtgttgtagtagttggtagggctaaagcatggatggaaaaagattttagccaagatataacagcaggtgtagatttcatggctaatgtaagaaataaagtagcttcattttgggaggagattgaccaggatacattgttatcaatattaaaaggtatattctcaatgacaggaactgaaaataagaagtttgttgatgctcatacattagatataactaaaaatggtgatgggaaagtttctgctgaaagccttaatactactatacaaaaagcatgtggtgataataaaaataaatttagtctagctataatgcacagtagtgtagccactaatttagaaaatttaaatctactaacttatctaaaatatactgatgagcaagggatacaaagagatttaggtttagctacatggaatggtagaactgtattaattgatgatagtatgccagtagaagatgttgcagaaagtgcaagtggtgcagatgatggatatacaaaatatactacttatatattaggtgacggagcttttgattatgaagatataggagcaaaagttccttatgaaatggatagagaccctaaaacaaatggtggtcaagatactttatatactagacaaagaaaagtatttgcaccttgtggtatttcgtatgaaaagaaaaaacaagtttcattatctccaacaaaatcagaacttgaagatggttcaaactggactctagtaaatgatggagcaacaaccaaaacaaaatatatagaccataaatcaattgcaattgctcaaataatatcaaagggttaaattttatggaaaataatataattgatgatatagaaaaaagacttgaaagctttgaatatacattaaaagatggagataagtggttaataggttttgttaaagaaaagatagagaatataattaaacttgattgtaatataaatgaaattccaaaagaattaaaaaatattgaaatagatatgatagttggagagttcttatttactaagaagaatatgggtcaattagatatagaaagtctcaattttgaagttgtagaaaagtctatatcagaaggtgatacaaagatagacttttctataggaagtggctcacaaacacctgaacaacgctttgacacttttgtaaactatcttttgacttatggtaagaataaaatattaacttttaggtgtttaagatggtaagcaaatcaaggaaagcaatagaactgttatatagagataaatgcactatagtagagtaccaaccaattaaagaccctataagtaaaaggactagcaataaagaagtagttgtattagaaaatcaaccatgtaagctttcatataaaaatatagcttctgctacagatggaaaagtagctaaacttacacaaactattaaactctttatatctccaaacataagcgttaaagcaggttcaaaacttattataaatgataaagagtatgtaagaagtggagaatcagctatatatccaaatcatcaagaaataatacttgagttatttaaggataaagcataacggctagatggggcagtgttgattttagagagtttaaaagagtttgtaaaaagatggagaagcttacaaagattgatttagataagttttgcaaggatgcagcaagagaattagcagcacgattacttgggaaagtaattagaagaacaccagttgatacaggattcttaagacaaggatggaatggagtggcttatgctaggtcgcttcctgtgtataaacaaggaaataattatattatagaagttgttaatccgactgaatatgcaagttatgtaaatttcgggcatagaactaaagatggtaagggatgggttaaaggacaacatttcttaacaatttcagagatggaactacaaagccaagttgataagattatagagaaaaagttattaatattacttaaaggagtatttgatgcttaataatataattgatggaatatctattaaattagataaaacatttggagagagttatacaatttatagtgaagatgtggagcaaggtattaatgaaccttgtttttttattgttcctttaaatccaagcaagacaccatatccaagcgggagagaattaaagaaaaattcttttgatgtacattatttccctcgttcagaagataagaattttgaaataaatgagatagctgagatgctactggaggaattagagtatatagaaattgatggagatttagtcagaggtacaaatatgaattttgaaattatagacaatgttcttcacttctttgttgattataactattttactataaaaaataatgataccaataagatggatacagtagagttattcggtggtttgaagagaggtgataattttgagtaaagcattaagcaaagaagataactacaagtttactaaggagcagatagttaactctaagaagtatgtaaataaaaaagatttattaaatgcaattttaaaagaaaatgagttatattccttctcagaggtagaggatagaataaataaatttatgaaaggagtgagttagatggctttaggtggaggaacattcgtaacgcaaaataaaatacttcctggtgcatatataaattttatctcagctaagagggcaaccagttcattatcagatagaggtattgttgcaatgcctttagagttagattggggcatagatgaagaagtattccaagtaaccagtgatgattttgagaagtattcagtgaagtattttggatatgattatactcatgagaagctgaaaggtttgagagatttattcaaaaatataaggttgggatatttttataaattaaataaaggcgttaaagccagttgtactatagccacagcaaaatatagtggtatcagaggaaatgacttaaaagtaacagttacaacaaatatagatgataatgctaagtttgatgttgtaacacttttagataataagaaggtagatactcaaatagcaaaggttattacagacttacaagacaatgactatatcacttggaagaaggatgcaacactagaagcaagtgcaggacttgtatttactggtggaactaatggcgaagctgtgacaggagcagagtaccaagctttcttggataaaatagaaagctatagctttaatgctttaggatgtttggctacaacaacagaaattaaaagtttatttgtagaatttacaaggagaatgagagataaggtaggagctaagtttcaaacagtactatataagaaaagtgatgcagattatgaaggtgtagtgtctatagaaaataagattaaagataaagacttagttgaatctagcttaatttactgggctactggagcaatagcaggatgtgatataaataaatctaacactaacaagcgatatgatggtgagtttgatgttgatgttaattatacacaaatacaacttgaagaagctttaaaaactggtaaatttatatttcataaagttggtgatgaagttcatgtgttagaggacataaatacttttgtatcatttacagatgataaaaatgacgatttttcaagtaaccaaagtgttagagtacttgaccaaattgctaatgatatagcgactttatttaatacaaagtacttgggtgaagtaccaaatgataaatctggtcgtatctcgttttggaatgatgtagttaagcatcatgaacaactacaaaatatgagagcaatagaagatttcaaagctgatgatgtttctgtagaacctggaagcgataagaagactgttgtagtaagtgatgctgtaaaagttattagtgctatgagtaagctttatatgactgtttcagttagttaagagaggagtgtgataatagatgtctaaaaatattactatgaatgttagagatgcaataagtggttctaaagctgaatgttttgtaacaataaaaggtaaaagatataattttatgcaagctattaatttagaagctaaaatggaaaagaataaaagtgagatgccgattttaggtagcattacaaaaggaaacaaaagtacaggaagtaaattttcagggagtgcaacattttattataatacttctatttttagagagttgttatatgaatataaagaaacaggtgaagatatttactttgatatgcaaattaccaatgaagaccctacatcaagtgtaggaagacaaactataatacttgaagattgcaacctggatagtggaataattgctaagtttgatgctgatggcgagtatttggatgaggatgtagattttacttttgagaattggagaatagttgagaagttcaatatagcaaatggtatggaataagatacacatttataaattatagatgtgtattttttatttacaaaattaggagatgattaaaattaaagataaatatgagataaaagattcaatttcttttgattatagtaaaaaaagacctatagaagaatgtgttagtgaaatatataaaaaagcagggaaatatcttatagatattgctgataaactggcacttgatacaattgaaggttcatcattaaaaccaattacaataaaaatcaaactagatgaggatggcattgcaacaatagaaaaagaaacaaaatatttaatcatggaggtagaataatatgggagatttaaacgcttttttaagtcaaaatgcaataaaagtagagaatagaaagtatgtggcaagtgaaaggtttgtaggtgaagatggaaaaccagtagaatgggaacttaaagcaatagattcagatagagatagacagttaagaaaaaattctgctatcagagttcctgttataggaaaaaaaggaaaagctacaggacaatacactagtgaaacagattttaatacttacactttgaaattatgtgtggaaactatagtatttccggatttacatgatgcagaattacaaaatagttatggtgtaatgggggcagaggagttattaacaacaatgttgactcctggcgaatatacagacctttcaagtgaggtaggagaggtaaatggttttgatagaacttttgaagataaagtagaagaagcaaaaaactaattgaaggaggcgattatgatgctagtgtagctcattattgccttcataaattcaaatggaaaccacatgaatatacagatttaccagactacgagagggcatttgttgctgcttctatagatattaaagtagaagaagaaataaaagaagaaaagaagaatgctaaagaagctagaaggagtagaaggagataaaatataggtaaaatatgtaagaattatatgttataataattttagcaagaagatgtaatctacaatttatagagtggagttcatgtattaaaaaattatcctcccaacgataagaagggaggtgaatatacatggataattttttatttaatgtgttagctagtgtaacagctagttacatagtttatttgattagcaagttaatcaaaaaagtaaaaagccactctaccgcaaagagtgacttaaagattgatataaattttaaatatcatcgtaaaaaataactttcagttatagaacttcactctaccgcaaatagattgtagttcttcttgcttttattataccacaaattagaaaaaatatgcaaagtacttgttttaatagcaagtacttttttgtgtgaaaaagaaggtgattaaatgaataaagatatagaacttacagaaaaagatttatattgtattgctagacatattcaagtttatgtgtttaaaaaagatgatgaggtcataaaaaaggaagataatccatgttgcagatgtaaatatagatatgagtgttacaaaaataatgtttgtatttatcactgcaccacatttaagaagttatctaaaattacaggtcttaaaatgggtccaggaataaagatttagtacatttttagagccgccttaactaattcacaatcaaaagttccccaaaatggacattcatcagaacagggagaatctaagcgtatgaattttaaatctctttcagcaggagtaatacctatgccaggaatttcagaaaattcagcagttgccattatattttcatctgctactgaacagtactcataaatactttcaaataccatatattcaccatcctttcataattagtttagaagtatctaccaatacctcttgaattaattatagcatggtatattagggagatttgtttatattaagaataatatgtaaaaattttatgtttgtagtatatgaactaaataaaaaaaggaagcacttacttttggtaggtgttttttttatcgaaaggatgtgatgataatgtaaaaattttacttatatagtataataatcttataaaattattatattagggggatttattatgttttgttcaaattgtggtgcagaaattacaggtataggtaagttttgttcaagttgtggggttgctgtagaaaccgaaattattgaagataataatattaaatcaaatgatttaatcgttgatgctaatggaatagaaataaatatgactgaaatttatagaaaatatagaaaagaaaaagtaaatgcaataaaaaatgtaatggaaataagtggtttgaatataaaggaagcaaaaaaaatagtggattcttcctttgaagagttaaaaaacaattttattgatgatactatgagtaattcagaaaaggaaaaaataatacaaaatcaaaatagaaaaaataatattgaaaaagctcaacaagaatcagttgcttgttgccctaagtgtggttcaacatccttgacagctcaaaaaaaaggttttggtatagggaaagcagtagtaggagctagtctaactggtggtataggtttagtagctggaaatttaggagcaaagaaagttagagttacatgcttgaattgtgggaaacagttttgggcaggcaaaaaatagatgtattaattataaaaacacttactaatttagtaagtgtttttattatctaaattaacagaaaggagagtgaaaaaatggctacaatacagacatcaattcgcatatttgatggaatgacacctgtatttcggcatatgacaactgctatgaatatagtactgagttcatttgagcaattacaaagaacttctagtaatgcagtaaatactaatagcataataagagctagagaagaactagcaagagcagaagctggatttgatagattagaacgacaaataagagaatcagataatcaacagcgaaaacttaatgaggatataaataagggtgcaagttctacagatagattagttggaagtgcaaagaagctagcagcaacttatttaggtataagaacattaggaggtctaggaaatttaagcgaccagatgacaagtactaatgcgagacttggcatgataaatgatgggcaacaatcagatgctggacttaataaaatgatatttcaatcagctgaaaggtcaagagcatcttattttgatactgcaaagatagtttcacgaataggtatgaacgcaggtaaagcattctctagtactagagaaatagtaagctttgctgaacaacttaacaaaaagttcgtaatagcaggtgcaagtactgaggaaatgaattcggctcttttgcagttgactcaagggttaggaagtggagttttgcgtggagaagagttaaatgctgtgtttgagtcagcacctaacataatacaaagtatcgctgattacctcaacgtggatataggaaaaataaggagcatggcaagtgaaggtatgttaacagcagatattgtgaaaaattccttgcttgcagcagcagaacagactaacgcagaatttgagaagatgccttatacatttgggcagatttggacatcaataaaaaataatgcaattatgatatttggcgttatacaaaaaaagatagaacaatctatgtctagtaagggatttcgaacctttatagataattttatagatagtttatatattttaggtaatgtattttttaatatttttaatggaattataagcatattaggaagcccgttttttcaagcatttgtaaatgcgattattgtaggtgttagtttaatagtgcaggcactaggttggataataacacaggcattaaatattgctaatgtgtttgctcagaactggagtattattgcaccaatagtacttggagttgcggctgctatgttagtgtataacaatgcgttattacttagtattgcaaataaagttaaagatattgcactatctgccaaatctttagtcatgagctttgcacatatagtagcagagtcttatagagcagcagctttagtagcaactacaatagcacaagacggattaaatgcagcaatggcagcttgtcctattacttggattttatatggaattatagctatagttgctgccttttttgtagctatagcagtttttaatcattttgcaggcactagtgtatctgctataggggtagttgcaggtgcaatatcagttgcagcctctttcataggaaacttatttattgcaacagggaacttaattatagacattgtagctttaatatacaatactttagcaggttttgcagagttctttgctaattttttagatgacccaattggctctgttataagagcagtatctggaatggctaatgctgtattaggtattataagaagtatcgcaagtgcatttgatacagtttttggctcaaatttggcagatgcagtaagtggatggcaagatacattacaaggttggactgacaaagtagcaggagaagctaagataaaagttgaacgaatggaccctaataaactgcattttgacagatttaattatggaaaagcttgggatgcaggatataaatggggagataaactagaaactaatataaaagataaattcgatattagcaaaatagcagaaaaggcaaaaaaagatttaggattagacgacctttgggacaaaaaatatggtcttggcgattcaataggttctgcaggtcttaactctccactcagcgacgcagcaaaaggagcaaaagatacggcaggaaacacagcaaagatggcaaaaacaatggataaaagtcaagaagatttaaaatatcttagagatattgcagagcaagaaacaatcaatcgattcacaggagtaaacattaaaattgatatgaacaatacaaacaacataagtaaagatacagatgttgatggaatagtaaatgtactaactgaaaaattaaatgatgcaatggttgtttcagcagaaggaatagtttagagaggaggtgtaatcatggcttatgatttttacttggatggagtacaattaccaattacacctggcaaattagaaataaaaacaacaaataaaaataaaactgtagaccttataaatgatggagaagtaaacatattaaagactcctggtctatctgagataagttttgaagcagaatttacacataataaattaccattttgtagagggcaatttagagatgtacaattctttttaagtaaattagaactattaaaaacagattgtaagccatttcaatttattgtatctcgacaacttgggaataaagtactatttaatacaaatagaaaagtatcacttgaggaatataacatagtagaagatgcagaaaatggttcagattttaaggttgcaataaagttaaaacaatatagagattactcaactaaaaagttagttcttgcccctcctaaaaatgagactggtagacctaatgtaaagatagagccaaaacgagttgattcagtcaatgccacaaacactaaaacatatacagtaaaagcaggggatagcctttggtcaatttgtcagaaacaacttggtaatggttcattatataagaaggtatatgagttaaataaaacaatgatggataaagctaacaagggtaaaaaagtacctaaatataccatttataaagggcaggtgttaaaacttggctgatgaattagtgttagcaaatgatagagatataaggttagttattgcacattgggaggatttctacgaaccagttgtccttgatggaatcacatgggagatagaaagacgaggagtgccatctaaacttgaatttacaatagtaatggatgatatactacaattctgtgaaggcaactctgtaaggctgtattacaaaggtgtaggtatattctatggatatatatttcagaagaaaagagataaagaaaatcacattaaaattgttgcttacgaccagttaagatattttaaaaataaagatacttacgtatatagtaataaaactgcaagtgaacttgtaaaaatgttagctaaagattttaatttaaaatacaatgtcatagaagacactaagtataaaatctctaggatagaggagaataaaactttatttgatatgatactaactgcacttgatgatactttaagagagaaaaaagaaatgtataccttgtatgatgattttggaagaataacattaaagaatgttgcatcaatgaaactggatactgtcatgaacaatgatgtaattgaggattttgactataattcatcaatagatagtgatacttatacaaaaataaaactagtaagagacaacgaagagacaggtaaaagggatgtgtatattgcacaagattctacgcatatgagaagttggggaatacttcaaatgtttgatacagtagacaaaaacatgagtgaagcagagataaaacaaaaatgtgatatacttttaaaactatataataagaaaactaagtcgctaagtttaaaaaacgcaattggagatattagagtaagagcaggttgtttagtacctgtttttttgtcgttaggagatatagagttacaaaattatatgttagttgagaaagtaaaacatacatttgaaaataattcacatttcatggatttgactcttgttgatggagatgaatttgcttcttattcttcaagctcatatagtagtggaaatactaataataaagatgaaaagaaaaatggtcctgcacaaagtactacgaaaaaaaatacaggaagaaaagtaccagcattatttacagcatattatcctggacctggtatagaaggtggagataaagattgtactggaaaaaaattagttcctaaaaatcaaacttgtgcagctcctatggatgtaaagaaatattataaaagttggtatagtgaaaagtttttaaaggaccatccatttataaaactaaatgataaaatcaaagtaatattaccaggttcatctatagatggaaaaacttatacggttagagataatggaagtgctattaatatatcttcatcaggagtttatgacatagatatattaatgtctacagcaagtgaatgtaataggtttggcaaaagaaaagggtatataattataaatggagaggaagaagaaacttatcaaattcaaggtaataatcaagttagtaatacaaataacaactctaaagcagataaactaattagtgtagcaaaaagtaaactgggttgtaattatgtgtatggagcagaaggtcctaataattttgattgcagtgggtttactcaatggtgttataaacaaataggtataaaaattcctcgtactgcttctgcacaaagtaaagcaggaaaagcagtagatttaaaagatagaagtaagtggaaagcaggagacttattatgtagaattggtggaggaagtagtaatcatgttgtaatgtatattggaaacaatcaaataattcattcaccacaaacaggagatgtggtaaaaatagagtctgttaattcttatagaaaaggaaaagcgtacacacatgtaagaagatttatataagtgaggtgataaagtgtcacaagaattattacaagtaatcaagaaggctgcaatggatgcagtagaaacaagtaatccaatgactcttgcatttggaactatagaaagtgttaatcctttagtagttaagatagagcaaaaagcatcctttgaagaattttttttaatacagacagatacatttaaaagatatacagataaaaaagtaggagataagttagtattaattcgtatgcaaggagggcaacaatatttaatattagataggatgtgatgaagtgataccaagcgataatgttgactatgatattgaagatgtatcaattataaattttaatgtaagacaagaaccaagtaagacatttaaactgaatacagaaaagtctaagatagatggtatttgtgatgatgttgaagcattaaaacaggccatctttttaattttaaatactgaaaggtatgagcacctcatttattcttggaattatggagtcgagttaaacgaccttattggagaacctgtctcatatgtaatacccgaacttgaaagacgaatcaaagaagcactaattcaagatgatagggttgaaaatgtagataattttgagtttcaaaatgtaaagggtaaagtacattgtaagttcacagtttacagtaaatatggaaatataaaagcagagaaggtggtgagtgtataattgtttgagttaatgacatttgaaaatataattaaaagaatgttagatagtgtaccagatacttttgataaaagggaaggttctataatatataatgccttggcaccagttgctatagaacttacagaaacatacattgcaatggatgaattactagaccaaacattcgtagatactgctagttattactatttagagaagagatgtaaagagcgaggaattacacctttacctgcaaccaatacaattgcaaaaggagtttttaacatagatattccacttgattctaggtttaatctaggagaatataactatgtagcaattgagagaatatctgaaggtatatataagatgaaatgtgaaactgctggacctatttttgagttggggcaactaatacctattgaatatatagatggtcttgaaacagcagagttaacagaaatactgataaatggagaagatgaagaatcagaggacagtctaaggcaacgatattatgatagtttaaattctcaatcttttgggggtaatatacaaaactataaggatgaagttaataaattgcctgacgttgggggagttaaagtatatccagtttggaacggtggaggtactgttaagttagtaataattaattctaacttcaaagttccatctagtgatttagttaatttagttcaagaagaaattgaccctctacaaaaccaaggagaaggtcttggattagcaccaattggacaccgagtcacagttgaaggagttacaagtacaactataaatatatcagcagaaataacatataagagtggatatacatgggagaatataaaaacaattgcagaagaagcagttgatgactatttaaatgaacttaatatgagttgggaagatgaagaaaacttaatagtccgtatatctcagatagaaactcgtttgttaagtatagatggagtgttagatattacaaacacaatgataaatgatgttaaatctaatctaacaatagatagtaacagtatagtagtgagaggtgaggtagttggataaagagattaatctaataaattacttgccacaaattctacaagataaagaagaatatataaaagtatttaatgcagaaaacaaagaaataaaaacattacatgataaattaaaggacctatcaaatgaccagtttttagaggacctaactataagtggtataaaaagatgggaaaagataatgtctataactcctaaaagtaatgagagtttagaagatagaaggtttaggatttttagtaaatatataagtaaactaccttactcagagagatttttaaggaactggctagataatgtagttggagaaggcaattatgaattaactattaataatgctacttataacatacaccttgagagtgatgctagaaatcaagattggtttgaggaagttcattcttttgtaagtaatattaagccatgtaacatgacactagattacactagagtgcttataagcaaagacaattatatgaattttggtataacaaccttaatgggtcaagaaataactatatacccttggagtccaccagatatagaaacttatggagaaattgatgtattaactggcaatggagttggataccaagaggtaacaatattttaggaggtgatatattggctatagataaaagttattacactataattacagatgtaggaaaagcaaagatagcaaatgcaagtgtcacaggtaataaagtgggatttgtaaaaattcaacttggtgatggaggagggagtgaatatactccaactgagagtcagacagctctcaaaaatgtggtatgggaaggcaatatcggaaatacaactacagatgaaactgcaccaaattgtataatattagagagtttaataccatcaagtgtaggcgggtttatgataagagaaataggatatttagatgatgaaaataatttaattgccatttctaaatacaaagagtgttataaaccttctatagaacaaggtgcagtggtagacatgaaggttaaaactgtgcttattgtatctaatgtaaataatatagaacttaaaattgacccaacaataatctttgcaacactcaaagatatacaagacttagaaactaaaataagcaatgttaacactaaaatagatacaactaaaacagagttaacaagcaacatagaaactgctaagacagagttaaacaataaaataggtgatacaacacaacttactacaacagataaaacaaatatagtcagtgcaattaatgaggtaaagactagtgtagatagcatagaaacaacagcagagaaaacaagtataaaagatacagataatttatttgaaagtgataatgttgaaggagcattaaaagaagtgatgcaagaagtaaatgacaaaaagactaaaggtatcaaagcttttaataaacttgtagatatattataaaaaggagtgattaagtgacaattaataagctgccaaatagtgcgaacttaaatcaacttatgacttcatttgaaagtggagtgaatgaaattgagacaataaaaaatgaaattgctaatactttaatagcaaaaaagtttaatgtaacacaagaaaatacgttgagagaattgtctgaaaaaataaaaactatagaaactttagaagaaatggtaggagattctgatggggttacaatgtctaaggaatataattgtatttatcgtaattatacaagtagaacaataaatggtgtcaaaacatacggaacaaatcttactagtataaacattgatactgaatattctactgatatgaaaggtaaagtacgtttaagagatatagatagttcagaaaacttgttaataagtgttgataataaaaaacttatcaaacgaagttgttccaactcaggtaagtattgggagcataatctcaataataacattatggattgtgtaaatgtcgataaaagggataatagtataataatatgttattcctctgaaaggtgcatagaaaaattaaattcaaatggaggagtaatatggtcactaaatatagctggttctcaacctttattatgttgttctattgataaggagggatatatagcaactggaggatatgacaaaaaagttcaaagagtatctccaaatggaagtttgttatttgaatatgcaggttttacaaattatgtaacagcaatagcaacagatagtcaagggaatataattttaggtggatatggatatagaatcgacccacctaaaggtattcaaaaaatttctccacaaggagaattactttgggaatataattatctttctaaaacattaccaatttactcaattactgtagatagtcaagataatatttatgtatgtgattggactaatcacttagtaaaattatctaaagatggtaagtttatatggagtattagtattaataattcagagacttttggtagaacattaattgatagtaaagataatatatattatattgctaaacattttttttataaaatatctaatgattgtcagactatagaaaattttgcaacaagcgaaggaaaatttgtatttgttgagttaataactatagatgcaactcacgatgatagaatttggtgttttgattattcgggtgctaataattatttttatagatatagctatccaactgatttcacttcaacatcaacattagttttttcaaaaagttataaagctggacttaaatagaaaaattaacgaaaggaattttaaattatgatttatttaggaaatttactagacacaaaggaacaaaatataaaatatattggaatgatacactataaaccaagtgtattaggagaagaagacttaaaagagggcatcttagttgaggaattgccgacacaacaatatgcagagaataaagaggcaaagttatttataaatatagatactaaagaagttttctatagatatacagatattaaaagtagtatagaagataaagtaaattctacagaacaaacaatagcagatttaacatttcaattaatgaataatggggtgatatagtatgaattggtataagataataacagacttctacagaaatgggaactggactaaagaacaagttaaaatggcagttgcaaagaataagataacatcaatagaatataaagaaattgtaggagaggactatatagcatagtctttttttattcaaaaattaggaggcctacatgaatgaagaagttataaaagaaaaaataaaacgaaatgaaataagaataaacagacacagtgatgaaatagacgaattaaagatagcaaatatagagtctaaagcagagttaaaagcattgtgtgagaatttaaattcacttacaagcatgttgtggctaattggaacaatgattacaacactgataggattctttatatttgcagttcaaagaggaatattttaattaattaggaggataagagatggataatttaataagttttataccagagcagttgctaattttagtagctgctctctctattataggtaaaggttgtaaaaaatataaacaactagataataaatacattccaattatattacttgtgttgggaatcggattttctatttggatgctagggtttagtcctaacgcagtattacaaggtgtaatttgttggggtatatcaataggtataaatcaaacttacaaacagttgaaggatggtgaaaaataatgaaaatagcaatagtaccaggacacactttaagtggaaaaggaacaggagcaactggctatatagatgaaggaaaagaaaatagaatcttaactgatttaatagtaaaatggttgaaacaaggtggagctactgtatatactggaaaagtagataaatctaataactatttagcagaacaatgtgaaattgccaataggcaaaatgtagacttagcagtacaaatccatttcaacgcaaataaaacaactctaaatcctatgggtacagagacaatatacaaaactaacaatggtaaggtatatgctgaaagagtcaacaaaaaactatcaacaatatttaaaaatagaggtgcaaaatcagatgtaaggggcttgtattggcttagtcatacaaaagcaccagcaatattaattgaaacttgttttgtagatagtaaagctgatacagattattatattagacataaagatacagttgctaaattaatagcagaaggtattttaaataaaactatagataataaagagaatagcgaggggaaaatcatgtacaaacatacaatcgtttatgatggagcagttgacaaaatacctgcaactgtggttggctggggatataatgatggtaaaatactaatatgtgatataaaagattacatacctggccagacacaaaatctttatgtcatagggggtggagcatgtgaaaagataagttctattactaaagaacattatacaatgataaagggtaatgatagatttgatacactttacaaagcattggattttattgatagatagattaagatatttatttacactttacttacaatttcaatacaaaaggaacttaaatatatgatataactaagataagacatacttatgttaatttgattttaaatatacaaaatatacagatgaataggtatataaaataaataaatgaacaaaattatatataactaataaaatgtagttacatatttttattaaattgtttttgaaaaattaactttaagaatgtattaatatcataatgaatataaattgtattaaataaagagttattctatagattgcaaatgtaggttatatctaatataattagtgtataccataatttgtaatccgaaaaggaggaatttatggtagaaaagttaaagggggggaaatttatgtataaaatggaactattaaataacattaattatagtgttaagtatatacaagagattcctcagagtagtatcgctgagtatgaacaattttgtgagtggttaaatgataaatataaagatgataagagaaagataaacgaaaataatctagagtattttgatagttctttaaataagattaagattttactggagggaattaataaaaatataaagtctatagaaaagattataaatctaaataagatagattttgataataaagaacattttatagaacttttggaggatatgaaggatgagtatgaatttttgactgatactgattctactgactatgaacattttaaccgaatcatgtcttggtatagattgacaccagattatttggattcatcaataaaacatttagcaaacaataaagttgatttgaaaggtatagattttgatgaggtattaacttcagaacaatatagtgtaaaaataattgaagatgaactttaagggggatttaaaggaaaaatgatgcttaattgtagcgtgtgtaagaatatagaagactataagattatattgacatctttgaacataagtaataagttggtagaactgccagaaaaattatcagttggcattaaatttgaatttttagatttagaatttgaaaaagataaaataaaagtaccttttaatttagacataataggtatggataaagaggtagatgaagattttatagacaaaagtgacgatgatgtattatttaaaataaatttagtttataataatgtattatacttagaaaatgagattgagaataagacagatttaaataaagaattagaaaagtatgtttattttttacttgaaccaactttaaatgaaactatatcttcaatcggaaataaaattggaatcccaagcttaaggattccaaaaaggataaagtagtatgaagataactataagctataatcaaatcatttatcaagaagaacatattgtatttgaattgtctaatttaatattagataatccaaaattattaacagttttagctaacatatatatattgattggagaattaaaacaaaagaaaaatttagacaaagagaagcaaactaaaaatattgtaagacgtgttacaaaaaaagctcttttttctggttggataagcgaagaaatagggcaagattttattagatgttggaatgaaataagtagtgaaaatttaggaaaagtattagaacaaataatatcaagaattggaccttatgatgtagaaaaatttgaagattttcataaatcgatggaagtaaaagttactcagacaggtatgaaaaatgattttgatgtagttttttttgaaagagaatcaaatcattgttataaaaaaggagagtatatagatatatctggttatggtgagttccatgaatgtaaaaaaaatatctgtacatatatacctaaagacccgaagagtgatttagataagagagtatcaaataaattaaaatttataaaagccacatatgaattaaaaaaagataataagttttatatcccaactttttttcctatggttaagtcacaaagagaatttttaaaagattatttaaatggagaatacaattttatagaaatattggatatatatcaacttgaaaataaaattatgcttagttaaattaaagctatttctcagcttggtaaaatgtgagcttacaaagcacaacaaaattacataatattatattaagtaaaaggtggtaggaaaatcctatcaccttttttgattattaattatatcatggttttattataaataatttatatagttatatatttctttctaattagataatataatgctgttgttataatggctactaatattattgctaatattgtaatatctaatcttcttgtaaataagcctattgctatatactcaagacctgttacatagcgataaagtacttctagtttaacagtttttttcttatctatatttccatatattgattctaatttattaaaatattttttactacaaaaagcagttttaggtttaattaaatatattattgtagttcctattataactattattccaataagtataagattgatattcccaaaattcatagtaggatacctccttcataatttagcaaaatagagttaattttcttaatcaaagtatatcagcaatataagtataaagagtatctaaaatattacaaatattaacaggatacataaaactatagtataagttgtaataataaaacgaacgaaaatcatcatactaaaacataagaaaaattgtatcagatatatacattaacatacaccaaagcactcttataaaaagagtgcttattttttattaattatttttatatggaataaattggaatattatatttgttccaatctgattgattacatactattattagtataaaatttaattatacataaattggtaagaggtgtaaactaatgaagattaataaattaccacatgcggaactaaaactaatgaagtatatttggggagtagatgatgtattagcctcaagagatatcatagaaacaatgaagttgaaatacgattggaaaaagagtacaacattgacatttttaaaaaatttagtagataagggctttttaactactgataaggtagatagatgtacgcattatactatagctataaaagagaaagattatttaaaagttgagacaaagagtttctttagttttatgcataacaattcatttaagagttttatttcagcattacatgatgatgaagttttagatagtaaaagcttggacaaattagaagaatactttaaaaatttgaaagaagaagatattgatgactaatttaaaaatttgattattattccatgtgcaatcatattagcattaattagtttaagttattttaaagaaatggtttatgaatttaaaaagaaaaatagaaaaaatatgcaatttttaattaagaggtatatactaaatattataattataatagcactatcattggggttgcaattaatattaaatactgtaagtattggtattattaagttcctagctaaataaaggagtttataatggatattatagagggatatatagattacataaaagataaaaaaaaattatcagagaacacagtggcatcatactttatggatataaaaaaatatatggaatatataaatcaaaaaagcattaaactagtagatatagtagaaaatgatattataagttacttaataaagttggaaaaagataatgtatcaatagctacaatagcgaggatgatatcctctataaaatcttttcatgattatttatttttaaatcatatatgtacaaataatcctgcaaaggatataaaaaaacctaaaataaaaaaagaaaatataaatatacttacagaagaagaaattgaaagactattaaattttccaaagttaacaacacctaaattgattagggacaaggctatttttgaagtattatatggtactggtataaaagtatctgaattagtagagatgaatatagaggatattgacctagatattgattatatatattgtaattcatgttgtaaaaatcaaagagtgataccactttgtgatattacaaaactttacttagaaaagtatctaaaagaagcaagacctaaaatggctgtagaaggtgaaaaatcattattcgtaagttcattaggtcaaaggtttacacgacaaggtctttggaaagtcataaaaaaatattctaatctagccaatatagataaaaatataaatcctacaatgcttagacattcatttgctattcatttgttaaatgaaggtgctaacattgctgttgtaagtaaaattttaggaaatgttaatttatctagtttgcaagtatatttaaatcatatagataaaaacgtgagaagagaaataaaggaaaaacatcctagaaatgatgttgatgtagaattacaaaaagcagaagctaaatagactatatagcaaattttataatttaaaaggagtatatttatatgagcagagtaatttggattgtaattgatagtgttgggataggagcattacctgatgctgaaaaatttggtgatagtaaggatgtaagtacccttggaaatatatttaaggaatatccagatattcagattcctaatatgagaaatttaggtataggaaacatagatggtatagatttttttgaaagtataaaagaaccaataggttgttttggaaagtgtaaggaaatgtctcagggaaaagatactactacaggtcattgggaaatgactggtataatagttgacaaaccatttaagacatttgaacatggattctctaaggagataatagaagagtttgagaaaaaaactggaagaaaagtagtaggaaataaaccagcttcaggaactgtaataatagatgagtatggagagcatcaaataaaaactggagatgtaatagtatatacatcagctgatagtgtatttcagattgctgctaatgaagaagtaattcccctagaagaactctataatatgtgcaaaatcgctagggaaataatgatgggggataatgcagtagctagagtaattgctagaccattcataggtaagaaaaaaggtgagtttgtgaggacttcaaatagaagagattattcactagacccatttgaaccaacagttcttgataatataaaagaatcaggacttgatgttttagcagttggaaaaatagaagatatttttaatggaaaaggaattacagatgctatccacactaaaagcaatatggatggagtggatgaaactttaaattatatgaaacaagataataaaggtctaatatattcaaatctcgttgattttgattctaaatatggtcatagaagagacccagaaggatataagaaagctcttgaagagtttgatagtagacttcctgaaataatggctaatatgagagaagatgatattttaataatcaatgcagaccatggaaatgacccaacatataaaggtacagaccatacaagagaatatatacctgttatgatttatggcaataagattaaaaaaggttttaatttaggagtaaaagatacttttgctgatattggagcaactgttgcagatatactaaatgtaaagttgcctaaacatgggtcaagctttaaagaagatttattttaaactataaaatgataaaaacttagcttaataggatggagagattggaatgtttgaaaagatagcacaaagtagtaaatttataaattctaaaagtaatataaaacctaagattggtttgatattaggttctggactaggtgatttagcaaatgatatagaagaccctgtcacaattaaatatagtgaaattccaaacttccctgtatcaacagtagcaggacatgctggacaacttgtaattggaaaacttgaaggaaaagaagttattgctatgcaaggtagatttcattactatgaaggatattctcagaaagaagctacttttccagtaagggttatgaaagaattaggagtcgagattcttatagtaactaacgctgctggaggcgtaaataaagaatttaaagcaggagatttgatgcttataagagaccatataaactttagtggaagtaatccattagtaggaaaaaatgatgacagatttggtgctagatttccagatatgtcagatgcatattcttctaaatatgtagatgtagttaaaaactgcgctaaagaatgtaatatagatgtcaaagaaggcgtttatatgttttttagtggtccaaactatgaaacaccagcagaagtgagaatggcacaaattttgggagctgatgctgtaggtatgtctactgttccagaagtcatagtagcttctcactccaatataggagttattggtatatcttgtataacaaatatggctgctggcatcttaaatcaaccactaagtcatgaggaagtaatagaaactactcaaaaagttaaatcagaatttatgaatttagttaaaacaacggttaaaaatttataagttaaagcttattatatattttttgaggaagtttataataaaatagttaatgtttaatttgaaaagaattaataaaaagctgtcttgatatagaaagttatttctaataaaggacagtttttttataatactacaacatttgaaagtgttttaaagtttaatatttatttaaattattatagattagaatggagatttcaattatgagaatgtatgatattataaaaaaaaagagagataacttagagcttagtaaaaaagagataaactactttatagaaaactattcaaagggagatatacctgactatcaagcttctgcactattaatgtcgatttatttaaataagatgaataaacaggaaactgtacatcttacagaagcaatgatgaactctggagacatgataaacctgtctgaggtagatggaataaaggtagataagcatagtactggtggtgttggagataagactaccatagctcttatacctttggttgcttcatgtggagcaccagttgcaaagatgtcaggtagaggtcttggtcatactggtggtactattgataaattggagtctataccaggtttttcgacagaaatggagataagtaaatttattgattctgtaaataagtctaaaatagcagtttgtggtcaaagtgcaaaggtagcaattgcagataagaaaatatatgctcttagagatgttacagcaactgttgataatatatcattgatatcatcaagtgtaatgtctaaaaagttagcttcaggagctgatgcaattgtgttagatgtaaaaactggtgatggagcatttatgaagacattagaagagtcttttgagttagctaaatctatggttgatataggtactggtatgaatagagatacaatagggattgtaacagatatggatgaacctttaggttttgcagtgggaaactctttagaagttatagaagcaattgagacattaaaaggaaatggccctaaagaccttgttgagctatgtgaagtattaggagcatatatgttggttttatcaaaggtagcacatgattttgaagatggtgttgaaaagataagagaatcaataaaatctggtactgctatacaaaaactcaaagagtttatagagaatcaaggtggtaataaagatgtagtagatgattattctttattcaaaaaatcaaagtataaatatccagttaaatcaattaaatcaggttatataagtaaaattaaagctgaagatgttggtgtatcagctatgattcttggagcaggtagagaaactaaagatgatattttagatttatcagcagggataattttagaaaagaaagtaggagattatgtaaatgaaggtgaagttttagcttacatgtattataatgatgaacaaaagctttcattggcaaagggaagatttattgattcctactctattgtagattcaaaaatagaaaaaaataaattaatatatggtattgtaactaaagaagagattaaaaagttttagaaaattttagaaaagtgattataaaaggcctaacatgtcaaaaataatgttaggttttttattttttgataaactataaattataccaaaaatatatattttaaaacattttttacaatataaataagtttattctacaagatgattgaaaattaaagtatctagttttataatagaaaatggataaatatacataaggagtagattatattatgaactttaaagaaaatagattgaaaatagcagtattaataattgttattttgattatcttagcaggtatatttgtgtttatacaaataggtccttatgataaaaataacaaaaaagatgtaattattgacgttccaagtggagcatctgttggaaaaatatctgacatattatatgaaaataaattaataaagaatgaactattatttaaacttttggtaaaggttagcaataaagctccgtctataaaatcaggaacatacttacttaatcaatcgtattcaaacaatgatataataagtcttttagtttcaggtaaaatatatcaggatggtataaaagtgactattccagagggagctacatctaaagaaattatagcaatgttagtaagtaaaaatttaggagataaagctacttttgaaaatttaataaaaaaacctcaagaattttatgataaatttccatatttgaaggaagatggaataacctctttagaagggttcttgtatccagaaacttattattttaattcaaagaaacaatcagaagaagatattttaagcgaaatgttaaaagtatttgacagtaaatacacggacaagtttaaaaagaaacaaaaagaattaaatatgactcttcaagaagtaatggaaatggcatcaataattgagaaagaagctgttcttgacaaagacagacctataatagcaagtgtgttttataatagacttaaggtaggtatgcctcttcaatcagatgctacaatacaatatatatttgaagagagaaagaaaattgtaacatatgatgatttaaaaattgattcaccatataatagttataaaaataagggattacctcctacaccaatatcaaatcctggtataaaatctattgaagcagcattatatccagagaaaacagactatttatattttgtagctaagattgatggtggaaataattatagtacaaactatcaagaccatttaaaatacgttaaagaatataaagaagcaagggataaacaatcaaaagatacaaaagcaacaaataaagaaaatacaaaaaaataaaccatgattataaaaagtctaacagggtaagaataatgttgggcttttttattgaaaattgttattcttagatttataataaagaaagtgtaaatatatataacaatatgaatttaaaaaataataaattaatataaaacttgaatatttattattttagggagtgtttttatgagtaatatagttaatgatttggttgaagattatataagagtgacattaaaagaaaaagaaggatttttaaaagatttagaaatttatgcagaggaaaatagtgttcctataatacataaagaagtttcagatttattaaaagtcttgttaaaggttcaaaaaccaaagagaattttagaagtaggatgtgcaattggttattcttctattttttttgcaagtattataggaaaagatgcagatataataactgttgagagaaatgaaaaaatgatagaaaaagcaaaagaaaacataaaattagctggatttgacaataacataactatactagaaggagatgcagaagaaaaacttagtcaagtccaaggtgaatttgaccttatatttatagatgcagccaaaggtcaatataagctattttttgatttagttatagataaattaaaagatgggggacttttagtatctgataatattttgtataaaggtatggttgctcatgatgattttgttgtaagaagaaaaaagactatagttaaaagaatgagaaattatttagattatatatgtaattgtgactatttaagcacatcattggtaccaataggtgatggtgtagcactaagttataaagaaagtaaaagaggtgatgtagatggaattaaataaagtagaacttttagctccagcaggtgatttggagagattgaaaatagctataacatatggagcagatgccgtttatataggtggagaaatttttggaatgaggtctgcagcgaagaattttagtaaggaagatatggcagagggagtagcttttgcacatgaaagaggcaagaaagtattcgtaacagtaaatataatacctcataatgaagattttctacaattagaagactatttgttggaactagaagagataggaatagatgcagttataatagctgacccaggagtgcttagtgtcattaaaaaagtaattccgaatatggaaatacatttaagtacacaagcaaatacaaccaattatctaagtgcaaacttctggtacgagcatggaataaaaagagttgtagtggcaagagaattatcttttgatgaaatatctgagataagagcaaaaacacctttagatatggatatagaagcgtttatgcatggtgctatgtgtatttcttattctggtagatgtttaataagcaactatatgactggaagagatgcaaacaaaggttcttgtgctcaatcttgtagatggcaatatcatttggtggaagaaaaaagacctggtgagtattttccaatatacgaagatgaaaggggtacattcttctttaactcaaaagatttatgtatgatagagtatataccagagttaatcaaatctggtataacaagtttaaaaatagaaggtagaatgaagactgcatactatgtagctactgttgtaagagcatacagaatggcaatagatgaattttacagagccccagaaaactggaagttcaatccaatgtggatggaagaactaaaaaaaggtagtcatagacattttacatcaggtttttacttgaataaaccaacaacagaagaccaaaattatcaatcagcatcatatgttagaaactatgattttataggtatagttagagaaacagaagatgaagatggtcttattgttgttgagcaaagaaataaaatgtgtgttggtgatgaaatagaagttatgggaccatataaagaaactatgtttactaaaattgaagaaatgtacaatgaagaaggagaagctatagaatcagctcctcatcctagacaaatagtgaagttaaagctatcagtaaaagttggtaaagattatatgcttagaaaagttatagaagaaaaggttgaagaataataaaaaattgataaaaatagtattagccccttagaaattgtcaataatgaaattatctaaggggtgatttcatgtcaaaaaagaagactccatttttgaaaaaagtgggaaagagaagctggtgtatatttactataattttaataatttatagtgttttaatttataggctagttgatatacaagtattaaaaggtgataaatacaaacaaagtgttgaatcacaaagcgttgagaaagtcgagttaaatagtggaagaggaataatctatgatagaaacaacaagaagcttacagatacaagtaaatctcaggtattaattgttgaaaaagaaaaattaaataataactataaaattttggaacttattaagaaagctactaagatgaatgatttagatatatataaagctgtacaagagcaattgacacgccctataatacagattcagactaaaaatatcgataagagtatgaaaaaagaacttgagaaaaatggaataatggtagaagaaaaaactatgaggtacgcaaaagatggtttattatcacatacaataggatatataaaagaagatgataaatcaggtcaatcaggaattgaaaagagtatggatagtgtacttagaaattcaaatgaaaagtatataagtgcttttaaagctggagatgcaggaaatgaaaaatctctaaacatactaaagggaagtgtaaaaactgttgataataaggataaagatagacatctaaaaactactattgattataacattcaaaaaaaattagaacaaatactaaataaagaagaaaatcctacagcagcaataatctcggaagcatctacaggtgaaattcttgcaatgtgctctagacctaattttgaccaaaatgacatatcaaaaagtttaaaaggaaaaaatggggaatttgaaaatagagttataaaagcgacatatccaccagggtctgtatttaagatggtagttttattttctgcacttgaaaatggtgttatagatgagaactatacttacaactgtacaggtaagactaaagttgggaatactaatgaaatactgcgatgtaataaaagagatggtcatggtttccaaaacttaagacaagctttttctaattcatgcaatcctgcatttttagatatagctatgaaacttggaaaagaaaagatactcaaatctgctgaaaaattacatttatttgaaaaggttgatattggtcttgatgaagaaaaaattagagaagctccaaaaaacatatcaataagaaatttagctataggtcaagaaaatatagaatttacaccacttcaaataaatcaaatgactcaaataatagctaataatggaacattcaaaccactatacttatataaaagtcttgtggacaataatatgaatacaataaaaacttataagtcttcaaaaaaagaagaacttatttctccttatgtgtgtacacaagttaaagaatatatgaagtctgtatctaggattggtacagctaaagacctaaaagatattgaaggtggttgtggagttaaaactggtacagctcaaagtagtttaaataaaaaagctatagaccacggatggataacaggattttatcctgaagaaagacctaagtatgtaataactgtgttagtagaaggaactcaaaaaggaaataaatctgcaacacctatatttaaggaaatatgtgaaagtataaaataaattatgtactataaaatttaaggatatatcgtaactttgattttagatagaaaactttgtctaatgatgtacgatatatccttttaaaatatagtattaactttcttgaacaagctctttttctagttttttaagagcttttttttcgattctagatacatatgaccttgatatatcgagtttttgtgcaatttctctttgtgtcttatagccataaggagttaacccatatcttaactggacaatttctctttctctaggagtaagaattttgtttagttgttcgtaaagttttccaacttgaacttttagttcaacttcatcaagaacatagttagcctctgtgccaagtatatctaaaagacttatttcattacacactactctttatatgttattggtattactggtcttcatgtaatttcaaatggaccattaattcaaaagaatctagtttttgttctttagacttataataaaccgctttatcaattacagattttaggagtttattttttccaagggaatctgaatcatggtaaagtgataacacagttttaatatcttctattattttagaattgtcttttttaacagtactcaatctattttttactgtcttaattgaatctttaatttcttcagttcttgaacttatattgttggacctttcaataaatgtatcttcatcatatattcctcgttctagtaaatcatataacttatttttttgcttgcctaattcttttaactcagtttctaagccctttaagactcgtttttgaaattctatattactatctttattatttttatctaaatctaaatcagatgattttaattgatatttttttacagtgtcttccaaagattttaaaatggcagcttcaataaattcaaatcgagaacttttattgcaaccaggatggtaacaaattatatagtcgtggtctgcatatggtctatatactaatggtctaccacaatttttgcaaatcactattcctgcaagtggattttttatttgattaccatagctgacatgaccattttttttgagtatattttgagcttttttccatgttatttcacttattaaaggttcatgctttccttttgcttcaatccattcatctttaggtcttagtttaactgtttttattttatttggatttttagattttttgtagtcctttttttgccactgaatgtagccacaatataccttattttttattatatttgtaattgcagaattgtaccaattagcacctgtagcagttttaatgcctaagttatttaggtattttgatattttactacaacccatatcttcattaatatataagtcaaagatagtcctaactacatcagcatctttatttggtacaagtattctttcttttctaccagttgttacagcatcatatccaaatggagcagaggttcctatgaaattcccttcttcaactgattttattctacctctttgcatccttcttgatataagttttaattcttttcttgccataaatgcttcaaattctgaatactcctcatcaaattcatctgttaggtcgtatgtttttctaggtgtgatgattttggttttactttctttgaatgtttctaatatgataccttggtctttcatgtctccacgaccaagtctgtctaagtccattactaagactgcatcatatttattttcttcaacttcttttagaagttcaagcattttgggtctatgtattatactttcaccagaaactaattcttcttttatttcaattacatctaagttttgttcttttgctagttttagtagggttgatttatgtctacttaaagtttcaaattcgccttgtttttctgcctcttcatcagcacgggattttcttaagtatatagcaacactcatatagataatcacactccttatgcactattatatattataatttggagttttaataatatttttataaaaataagtacatttttatatgtacttatattaattataatagaatttaaacaagtgtttttaattatataatttaccataatatgttataatatttttagcaagaataataatctaaagtggcaagcatgtcagctggtgttatatcagtttatatttatgataaaataaaaatctcccaaacgccaataaggatgatttaaaaaaataatattttcacttaaaaataatcactttttataggagtaaattattttcttgattttattgtactacaaattggtacagatatttaaaaataatatattcataatattataaatagttttgcagtgagcgatatttttgataaaataggggttaacagttgaaacataaggcattgagggtatatgataaatattatcatttgcactactcgtggttcactgcaaatttgagagaattgtatagatgtaagtgttggaaatactcaatttattttggggttttatattaactaagtggaatgtaaatttgtttcccacagatgtaatgacaaatatatctcctagttttatattaactaagtggaatgtaaatttgcgcatgaaataagaacatctaaagacaaaatatagttttatattaactaagtggaatgtaaatatattttcttttgtactttgagatttaagtcttaatcgttttagattaactatatggaatgtaaatcatacacttttttaaatgcagcactaccaaagcgatggttttagattaactatatggaatgtaaatattgcaatgcttcatcaactattacacatagtatcttgttttacattaactaagtggtatgtaaatattttattagcttgtcattttatagattaagggttgagttttatattgactatgtgtacaagaatagagtagtttgaactactctattttttatttaaaagtatattttacattaattttcttcttcttaactcttcttcacaataatatcgacacaattctaaaaaatctatttctaaagcaagtgataaatctatgattgtagaaatattaatatttttgtatctcttattttccaaatcagaaatatatgctctactataattcgctttttctgctaattcgttttgagtcatacctctttcttttcttagtttttttagcatatataaaatctccttttatcaaattttatataagataatatttgtagaattataaaatatatgatggtattagcgtcattattttatggaaatttatggtagaatatagttaagaatattaagaaaatttattttgaaggtctataaataccgaccaaataatttgtaaaaacaatgtaaaaataatgtgaaaaattgtaagaaaaaaatcaaaaataaaatgatttatttttagaaaatcatgtttagtcatttttagcgttatacaacattaatgtttattaacgagtattaaatagtactagtttatttaaaatcaaaactaaaatgaagaggtgtagagtttttttgtgggttgcaggaatttttggaagtctatataatatatttacaaagtaattcttagaaagttagtaaaaatatatttgttgaaataaatttactagagttgtaaatggggggattttcatacctatttttacgaacgtaagttcttaaaatcttaatatttattaattttagatgaaaataggagatataaagcgtttaaagaagataagagaataaaaaataaatatatagggagatgctttaagtgaaaatataaataatgtactaaatttatacaaataaggaaataacatatagtgtatttaaaaataaaaaggctggtggtgtttaatttgaagtatttttaagtgtatatttataatataaggggaatttttatatttatgaatggaggaatgtagtaatggatgaagaaagaaaaaaattaattgatgatgcagaaaaactagcaaacataggaataaatcaaattttaaagtttagagattcattagatatagaaaatataaaatatataaatatagttgcaacaaatttaaagccaaacataaaaaaatagccacccttttgggtggttttattgtgtcatatttttcattaagtttatgagaaattctttttgctcatcacttaatttgctaaaagtaaataatatatttttcataaacttatcgtcttcatttataatgtcagttgctatttttagaactttttcattttcagagaactctataaacatttctcctttaccagtttctaaccattctttattaacattatatatgtcgcaaatatcagagataacacgctctgtaggatttactttaccagtttcaatgtttccataatttgagcgacttatttttattgatttagctacttcttcttgtgtatgtcctaaagtttttcgcaattctattaatctttttattttttctttttcctccatgtttacatatcgcctcttttctttaataagataataacattaaatattaatgtttgcaacaagcaaatttattttttaaaatgcttgacacggtatataaaaagagatacaatgattgtaacaagcaaggaggtgctgaaatgaaaacacaaaaaactactcatcatttaaataatttaaatttggatgatgatgatagaaagcttattcaaatgactcttttgtttaaaaaattaaatttagaacaacaaaattatatctctgcaatggcagatggtatgaaagtatcaaatgagcttttagaaaaatcaactataaataattaagggggaaagaatttatgagtaataacttaatggtatttgaaggaaaagaagtagaagtgtttgagtttgaaggtcagattttatttaacccaaaacatgttgcagagtgcttagatataaaaaatgtaaatgaaaatttgagaaatatgaataataaacaagtaattaagttaactaattctaaaatcagtagtactgactttagaaaactacacaatacaggagaaaattttcttactgaaagtggtgtgtataagttaatctttaaatcaagaaaagaagaagcagagagatttcaagattgggttactgatgaagttttaccatcgataagaaaaacaggtacatacagcactaaatctaaagatgaatcagaaataaaatacatgaatgctcaagcaagattaaaaaatgcaagagcaagagaagcaaaaatatatctgaaattagctgacaaagtatcacaagctggtataccagaatttgctcaagtaatgtactcaaagactactgaacttatttctggagaagcattaatacctttacctaagagggagaaaaaaacttattcagctacagagataggtaagatattaggaatttcagctaataaagttggaggattagcaaatgcttataatctgaaaacagatgaatatggaattaaggtatgggataaagctaaatattcagataaacaagtacctaattttagatattatgagaatataataccagttttagaaaaagctttaaatgcttttgaaaactaaattgaactgtcttagatacggatattagaaaactaaatttaaggaggaataagaaaatgaaagaaaataatagaatagtgagtgctataaatgaggatatagtaggtattacagttgatggagagatagacttaacagataaggaattagaaatggtaaacaattttaagaaagttatgaatagcattaacaataaaataggtattgattctgggatttcacttagtgataacgagatagaaaataataaagatatgatatacaagattgcttcaaaagtggcatggcattataagaaaatgaactttgaacacttagaaatggatgaaaaactctttgatgattttacttttgagtttatgttaaagttctttggtgatatggaagaatatgaattaataaaatatcttacttatataggagaagaaagtaacgaattgagtgatagagaaaggatattttataaaatagtagatacacttgatacaatagctgatattaaaatatcagaccaaaataagatagaaaaaaaagttggtatgtgtataggtgaagataattatataacttattgtatagatgaagacttaataaaattttacattaaagatgaagaagaactagttataaataaaaatagccctctgctatatatgttagacacactattttatgaagtacatgaagagtaaaaattgcaataattaaataagtataagacaagtttatgagctcatattttataacaaggggtgatgttatgaaaatactacaacaatttaaaccatacaaatatgatgaagagaaaaacatagaatatgatgaaaaaattatagctaatcaaaacacagaagtttatatagtatatccacgtatatctgatgaagagaataggaggagatggaaagagtttgatgaagtagccaaagaagtagctattaatatagcaatgaagaaagctgagacagtagaaagttaagaaagtagagaagttgctaatacttagcactttctcaaagaagaaaattggacaactatttttaaacaactaggaataaataagcgatagtatgtttgaaagaaggtgatgaaattgcttagtcttgatattagtaagaaaaatgtgatgactcttaaaaaagatggtaagtttttagcagatatagtatttaaggacattaaaactggtaaaaaaatatcagttggaacattaaataaaaaaagtgctggtcaaagtaaccaacacaataaataaaaaaagttaataaaattataacataaaaaggagagatttaaaatggttgaagttaatataaaaattaaaggcgaagcaagtgaaataattgactcaattagagctatatttaatagctttggtgaagattcaatgacagagataaaagcagagcaagaatataaaagtagacgtagtagaaagttaaaaacagaagatttatcagaccaggaataaagaaggtgatataagttgcaactatataagcatcaagaggaagctttaaagctaacagaatataataataaatgtgcatactaccttgacatggggcttggtaaaacatttgtaggaagtgagaaattaataaatctaggaagtaatacaaatttattaatctgtcagaaatcaaaaattgacgattgggtacatcactttaaaacatattatccagatatggggataatcaatggtacaaagaaacttagtgaaggcatagagtattttaagattgttgaagttccatttatagtagtaattaattatgaattagcttttagaagaaaagagttattagatttaaaagattttactttaatgttagatgaatcatcaatgattcaaaatgaaaaagctaaaagaagtaagtttgtactaagtttaaaccctaaaaatgtgatactactttctggtactccatgtagtggaaaatatgagcaactatattctcaaattaaactactagggtggaatatatcaaaagatttatattggaagcaatatattgatgttgagtacaaagatattggtggttttccaatgaaggttgtaacaggttataagaatgttgacagattaaaaaagaagttaagagattatggagcagtatttatgatgtcagatgaagtatttgacttaccaaaacagatagataatgtaatgaaaattagtactacaagagagtataggaagtttaaaaaagattcaattataagtatttcagatgatattgaacttgtgggagatactacactaactaaaatgttatatgaaagacaattatgtagtcaatacaataaatttaaattagaagcttttggagacttaataaactcaacaagtgacagattaatagtattttacaattttaacgaagagttagacagattaatagaattatcaagagatagaccaatatcaatagtaaatggttctataaaagatttaagcaattatgaggaatataataactcaattacatttgtacaatatcaagcaggagctatgggtttaaatcttcaaaagtgtaataagattgtatattttagtcttactttatcttgtgaattgtttatgcaaagtaaaaagagagttcatagaataggtcaagaaaacacatgtttttattattatatgatttgtaggaatagtgttgaagaaaatatatataaaagcttacaaagtggtgttgactatacaaataatttgtttgagagaggagagtaatccttgggtgcagaaaaacaatttgaaaataaagttaaaaagtttttaaaagagcaaggttgttggtttattaaatattggggaggttcagcatatacaaaaagtggtataccagatttattagtttgttgtagtggtaaatttataggtattgaagtcaagggggaaaaaggaaaagcaagcgaactacaaaagtataatattaaagaaattgaaaaggcaggtggaataggaattattctataccctaaagactttgatagatttaaaaagatgattttagaaataaagaaagaaggtgagtaaatgcagttctcacatagtaggataggagtatttaagagttgcccatataagtataagttacaatatattgacaaggtgaaaacaatattaaatgcagattctaacaatgctttaatattaggaacatcacttcatactggtattgaaaaagatattgatgcagcagtaaaagaatattattttagttatccaagtataacagatttacacattaatgaagtgatgaagttagattatttaataccaaaagtaaaagaaattttaccaaaagggtttaatgaggttaaaataacaactagtgattttatagggtttatagatttgttaacaccacatgtatatatgactgatacaaacttaaatacaaatgaaacaaccatatattatgaagatgaagaaagagtatttgatatttatgactttaaatattcaaacaacatagatagatatttagaaagtgagcaacttcatctatataagtatttttatgaaaagcaacatccaaatcatgagataaaagatttgtactatgtatttgtacctaaaattcagattagacagaagaaaacagaaaacttacatcaatttagacaaagattacttaatgagcttgataaatctgaaataaaaatagtgaaggttgagtacgacccaaataaagttattaatttccttgtagatataaaaagatgtcttgaaaacaaggaatttgaaaaaaatcaaaataaattatgtaactggtgtgactaccaagaatactgtgaaaaggggattgattatatgttattaccaaatagtgaaagaagaagtgtggaaggaattaataaaaaaactttatggatttatggagcaccatttagtggcaaaactacattagcaaatgattttgaaaagcctttaatgcttaatacagatggaaatataaagtttgttgatgctccatacatttctataaaagatattgtaacagttgaagggagaatgacaaagagacaacttgcatgggatgtatttaaagaagctataagagaattagagaaaaaagaaaatgattttgaaacaataattgttgacttgttagaagatacatacgaagcttgtcgcctttacatgtatgacaagatgggaataactcatgagtcagatgatagttttagagcatgggataaggttagaacggagtttttaagcactataaaacgacttatgaaccttgactataaaaacataatattaatatcacatgaggatacatcaaaagatattaccaaaaaaggtggtgacaagataacagcaatcaaacctaatttacaagaaaaagcagcaaataaaatagcaggtatggttgatatagttgcaagagtagtagctgatggagacgttagaacattatcatttaagactaatgaagtgatatttggagggggtagattaaaagtaaaatctaatgaaattccacttgattataatgaattaatgaaagtatatgatgatattagtatagagaaaaaagacgttaagaagtcaagtaagactaaaaaatctaatgctgaggaagaagtagaaatgattcctatagcagaagaaataagtgagaaaactgaaaaagaacaaacagaggaagaagtaattgaacaagaagaagcaattaaaccagtcaagaaaactagaaaaaagagaagttagtttaagtgattatataagaaagatgattaattaaaaatttaaaagaaaaggatggtatgtgatatggattttagtaaatttgataaagcaatagatgtaaaaggattaaaagaagatataaaagaagcatctgaaaatagtggtaaatttaaagatgtgccgcatggcacttatgaagtagaaataaataaaatggagttaagtgaatctaaaaaaggtgacccaatgtttgtatgttggtttaaaatactagaaggagagtataaagattcattaatgttcatgaatcaagtagttaagcaaggttttcaaattcatatagtaaatgaatttttaagaagtttagaaactgatattgaagttgaatttgaatcatacagccaatatgcacaactcataatggatatagctgaggaaatagatggagagcttgaatttgctattgaatatggtgagaagaaaggttttaatacctttacaataaaagacatatttgaagtagcttagaaactttattacagctaggtgtatacatgcatctagctgtaatattaaaaaggtaggtaattaatatgagagtaaaaagaaaagatggaacttataagcccaggtaaaattgtaagatgtgtttggtgtggaaaaagattttacaagttagataactctaaagtcatatattgtagtagaaaatgtgcagcaaaagcgagaggggtgttctaaatgattttttatgattttgaagtattctcttatgactggttagttgtatttatagatgttctaaataaaaaagaagaagttattgtaaatgatatagataagttaaattcattttatatagagcatagagaagatatttttattggttacaacagtagacattatgaccaatatatttttaaaggactattatgtggatttaatgcaaaagaaataaatgattatattattgttaaaggtcaacctggttggaagttttcaaacttattaagaaacatacaaattaataactatgatgttatgactagttttcatggattaaaacaattagaaggttttcaaggtcatagtataaaagaatctaatgtatcatttaacattgatagaccattaactaatgatgaaatagaagaaactataaaatactgtagatatgatgtcgaacaaactatagatgtttttattgaaagaaaatccgaatttgaagcacatatgggattaattaaagcttttaaacttccagtatcatatattggtaaaactcaaacacaactaacagcaattatattagaagctacaaagaaagaacatgatgatgaatttgacttacaaataccagatactctaaaaattgagaaatataaggaagttttaagctggtataagaacccactaaatcatgactattctaaaaatctaaaaattaatatttctaatgtacctcacgtatttgcttggggtggtgttcatggagcaataccaaaatactatggtgaaggttattttttacatgtggatgttaattccttctatccaagtcttatgattagatataactatcattcaagaaatataaaaaatcctcaaaagtatgttgaaatttatgacaaaaacttacagttaaaaaaagaaaaatcacctctaagaccagcctacaaattggcagttaataaaacttatggaggaatgaaagataaaaacaataatttatatgacccaagacaggctaataatgtatgtgttagtggacagctgttattacttgatttaatagagaagttagaagggcattgtaaacttattcagagcaatacagatggattaattgtaaagttaaatacaatagatgattatgagttaatagatgatatatgttatgagtgggaacaaaggacaggcatgggtttaggttttgatgtatacactaaaatatttcaaaaggatgttaacaattatttagttataacagaagatggagaagttgaagcaaaaggattatatatcaaagatttaggaaatctagactatgatttaccaattataaataaagcacttaaaaattatatggtaaacaatacacctattgaagaaactataaataactgtaatgatttaatagagtttcaaaagatagtaaaaataagtagtaaatattcacatggtttatatagtccaactatagagggaaaaacaaaaaaagtatttattggcggtaagattttaaatgataaatgttttagagtatttgcttcaaaaaataaaaatgatggtggtatttataaagtcaaaaataaagaaaaaaatccagaaaaatttgctaatacaccagataaatgttttatagaaaatggaagtgttataggtaaaaaagtaccaaggaagctagataaaatttggtatatagatttagcaaatgaaagactcaaacagtttggagtattattaagtaattgaggtggtgattagtgagttttgacctatttaaaggatatatagttacaaataataaaaaggcagctgagaaatttaaaaatgtaaaaaagttaaaaacttatgaacagattaagaatttaccagagtttgcaggtgttttagcagaagaaactgtgttagttgatattgatgattttgaaagtagtgaaattctatacaaaatagtacaagatttaaagctaaaatgtagagtttacaagacaacacgaggtaagcattttctatttaaaaatactagtttagaaaagaatagaacaaaatgtagactagctataggtttaaattcagatataaaattaggatgtaaaaattcctattcaattttgaagttcaacaatattgaaagagaaattctatatgatagtaaagaaatacaagagataccagtgtatttagtaccaattaaaaatggaattgattttctaagtcttggagaaggtgatgggagaaatcaagcattatataactatattttaactctacagagtaatgattttactattgaggaaataagagaaacaataagagttattaataaatatgttttaaaaactccattacaagataatgagcttgaagtaattttgagagatgaatcttttcaaaagaagatattttttaattcaaaaggttcatttttatttgatgagtttgctaaatacataaaaaataataatcatgtaatcaagataaatgaccagttacatttatataaggatggtatttatgtagatggtcaagcaagaatagaagcagaaatgattaataatataagcaatttaaataaggctaagaggagtgaagtacttagttatttaaatttattaataagtgagaatacaagtatgtcagaagctaatttaatcgcttttaagaatggtatatataatatagttgatgattcttttatagaattttcaccagaatttatcataacaaataaagttaattggaattacaatccagtagcatattcaaagttagttgataaaactatgaataaattatcctgtggggattttgaaattagaatgttacttgaagaagtagtagggtactgcttttatagacgtaatgagcttagaaaagcttttatattaactggagataaagcaaatggtaaatctacttatctggatatgataaagacattattaggagatgaaaatacatcagcacttgatttaaaagagttgagtgatagatttaaaactgctgagttatttggaaaacttgctaatataggggatgatataggagatgaatttattgctaatcctgctatatttaaaaagttagtaagtggtgatagggtaaatgttgaaagaaaaggtcagaatccatttgattttaacaactatagtaagtttttattttcagctaataacatacctagaataaaagataagactggagcagtgcttgatagactaattattattccttttaatgctagcttctcagtaaatgataaggattttgacccttatataaagtacaaattaagagagcaagaagcaatagagtatttaataaacttagggttacaaggtttgaaaagggtattacaaaatagaaaatttacagtcccagataaggtcaagaaagaaatactagaatatgaagaagtcaataatcctattttaggattttttaaagaagttgataagatagaaaatgaatcaacaaaagaaatatataggaaatatcaagagtattgtatattaaatggattacagcctatatcaaacattgagttttcaagacaagtagtcaaaaagtttggatatgaagtaaaagataaaagaatacaaggtaagaaatataaagtatttactagagcagtcccgggatagtcccggatgtagtccctagatgtaatatagtaatttcaacgttgtcccggatgtccctagatgtttttgaccttttatatatttaactaaaaaatcatcaattttttgtgatgattttgctccctttatataaagaatatatatataatagtatgggactgaacaaaaattattgtctggatatattgaaatagctaggcttgaagcagtcccggatgtattttacatctgggactgggtttaattaagaagttatataatgtaaaaatatttaaaaaataagatagatttcattaataacctaataaaataattaaaaagaaaattctgttaatttgcaaggatgtgaaaatggagtgacagactatgaaaaattagaagaattgttaaattcatatagtaatttggatattgaaattagagaaatagagttaaaagtaagaggtagtagtttgagaggaatagagttaaatggaatgcctaaaggaaatgatgtttcttcaccaatcgaaaatgagttaatatatgttgaaagattggagaatgagaaaatatatctacaaattaaaaaagaatcaattaataatatgttaaatttattagatgattttgagaaaaatctaatagaactaaggtattttaaaaaattacaatataaacaaataagttatgaattaaatataagcgaattatatgtaggaaaaaagagaaaaaaagcactagataaaatacttccctttgctaaaaaatataatctaatatga

SEQ ID NO: 7 - DNA, 747 bp, Clostridium difficile
  source 1..747: mol_type = genomic DNA
gtggatatattaatttttgataatgatgtttgttttggaataaaactaaaagaaaaaataaataatattttaataaaagaaggttttgataacgatgttataagattatattataatgcaaatttgttattaaaagaacttactgaaaaaaataaagtaaaaatatattttatagttgtagatgcaaaatacaagataagtaatgaattatgtgatggattatggatagcacaaaaaattagagaatcagattatattagtccaatcatatttcttacaaatcatatagaaatgattttagggatcttcgattataggttagaagttatggactttatattaaaacatgatatggaaattgctgaaagtaaaataaaagcttgtattaaaattgctcataaaagatacgttaaagaaaaaaattatcgctctaatttttttactatctactcagattcctcactatggaaaatttcatttgatgaagttatatattttgaaacaagcgctattccacataaaataaaattagtgactacttcaagaatatttgaattctataaaagtttaaggtctttatcagatttagatgcatgctttattcgtgtacataaatcttttgtagttaataaatatcatattgtttctctcgacctaaagaaaaataatattaaaatgagtaatggccatatatgtcgtatatctaatacatatagaaatattttaaagaacattattaaaacataa

SEQ ID NO: 8 - DNA, 678 bp, Clostridium difficile
  source 1..678: mol_type = genomic DNA
gtggatatattaatttttgataacgatgttataagattatattataatgcaaatttgttattaaaagaacttactgaaaaaaataaagtaaaaatatattttatagttgtagatgcaaaatacaagataagtaatgaattatgtgatggattatggatagcacaaaaaattagagaatcagattatattagtccaatcatatttcttacaaatcatatagaaatgattttagggatcttcgattataggttagaagttatggactttatattaaaacatgatatggaaattgctgaaagtaaaataaaagcttgtattaaaattgctcataaaagatacgttaaagaaaaaaattatcgctctaatttttttactatctactcagattcctcactatggaaaatttcatttgatgaagttatatattttgaaacaagcgctattccacataaaataaaattagtgactacttcaagaatatttgaattctataaaagtttaaggtctttatcagatttagatgcatgctttattcgtgtacataaatcttttgtagttaataaatatcatattgtttctctcgacctaaagaaaaataatattaaaatgagtaatggccatatatgtcgtatatctaatacatatagaaatattttaaagaacattattaaaacataa

SEQ ID NO: 9 - DNA, 69 bp, Clostridium difficile
  source 1..69: mol_type = genomic DNA
tttgataatgatgtttgttttggaataaaactaaaagaaaaaataaataatattttaataaaagaaggt

SEQ ID NO: 10 - DNA, 22 bp, synthetic construct
  source 1..22: mol_type = other DNA
gtatggataggtggagaagtca

SEQ ID NO: 11 - DNA, 24 bp, synthetic construct
  source 1..24: mol_type = other DNA
ctcttcctctagtagctgtaatgc

SEQ ID NO: 12 - DNA, 32 bp, synthetic construct
  source 1..32: mol_type = other DNA
agcagttgaatatagtggtttagttagagttg

SEQ ID NO: 13 - DNA, 26 bp, synthetic construct
  source 1..26: mol_type = other DNA
catgcttttttagtttctggattgaa

SEQ ID NO: 14 - DNA, 28 bp, synthetic construct
  source 1..28: mol_type = other DNA
ataaacctaggaggcgttatgaatatga

SEQ ID NO: 15 - DNA, 34 bp, synthetic construct
  source 1..34: mol_type = other DNA
ttattgcacttaaacatcctaataatgtatcaaa

SEQ ID NO: 16 - DNA, 26 bp, synthetic construct
  source 1..26: mol_type = other DNA
agcaagaaataactcagtagatgatt

SEQ ID NO: 17 - DNA, 26 bp, synthetic construct
  source 1..26: mol_type = other DNA
ttattaaatctgtttctccctcttca

SEQ ID NO: 18 - DNA, 20 bp, synthetic construct
  source 1..20: mol_type = other DNA
gcagttaagtgggaagatag

SEQ ID NO: 19 - DNA, 20 bp, synthetic construct
  source 1..20: mol_type = other DNA
tccatacctactccaacaat

SEQ ID NO: 20 - DNA, 22 bp, synthetic construct
  source 1..22: mol_type = other DNA
ttgaaacaagcgctattccaca

SEQ ID NO: 21 - DNA, 23 bp, synthetic construct
  source 1..23: mol_type = other DNA
tgtacacgaataaagcatgcatc

SEQ ID NO: 22 - DNA, 21 bp, synthetic construct
  source 1..21: mol_type = other DNA
gatcacaagtttcaggacctg

SEQ ID NO: 23 - DNA, 20 bp, synthetic construct
  source 1..20: mol_type = other DNA
gtcttaggtgttggattagc

SEQ ID NO: 24 - DNA, 21 bp, synthetic construct
  source 1..21: mol_type = other DNA
gtgtatgtgatgtatgccaag

SEQ ID NO: 25 - DNA, 20 bp, synthetic construct
  source 1..20: mol_type = other DNA
cctaaggctgcgacaatatc

SEQ ID NO: 26 - DNA, 47 bp, synthetic construct
  source 1..47: mol_type = other DNA
aaacagctatgaccgcggccgcctaaacacacattatcatctctctg

SEQ ID NO: 27 - DNA, 56 bp, synthetic construct
  source 1..56: mol_type = other DNA
aactttcagtttagcggtctgggcgcctaaataccctcctataaaaaattcaaaag

SEQ ID NO: 28 - DNA, 58 bp, synthetic construct
  source 1..58: mol_type = other DNA
ggcgcccagaccgctaaactgaaagtttaaatagaaaaaagagatgtctcaagataag

SEQ ID NO: 29 - DNA, 48 bp, synthetic construct
  source 1..48: mol_type = other DNA
ttatttttatgctagctcgagtaagtcttgtgcataaatgttattagg

SEQ ID NO: 30 - DNA, 59 bp, synthetic construct
  source 1..59: mol_type = other DNA
aactttcagtttagcggtctgggcgccttatcaaaaattaatatatccactaaataccc

SEQ ID NO: 31 - DNA, 60 bp, synthetic construct
  source 1..60: mol_type = other DNA
ggcgcccagaccgctaaactgaaagttttttgataacgatgttataagattatattataa

SEQ ID NO: 32 - DNA, 49 bp, synthetic construct
  source 1..49: mol_type = other DNA
ttatttttatgctagctcgagatctgataaagaccttaaacttttatag

SEQ ID NO: 33 - DNA, 56 bp, synthetic construct
  source 1..56: mol_type = other DNA
ttataatataatcttataacatcgttatcaaaaattaatatatccactaaataccc

SEQ ID NO: 34 - DNA, 56 bp, synthetic construct
  source 1..56: mol_type = other DNA
gggtatttagtggatatattaatttttgataacgatgttataagattatattataa

SEQ ID NO: 35 - DNA, 60 bp, synthetic construct
  source 1..60: mol_type = other DNA
aattaaactgtaaatggccaaataatattttaataaaagagttttagagctagaaatagc

SEQ ID NO: 36 - DNA, 34 bp, synthetic construct
  source 1..34: mol_type = other DNA
aaccatctaaaaatagttgcagagcttacgcgtc

SEQ ID NO: 37 - DNA, 24 bp, synthetic construct
  source 1..24: mol_type = other DNA
agcggtatcggcttggttgtagat

SEQ ID NO: 38 - DNA, 24 bp, synthetic construct
  source 1..24: mol_type = other DNA
tgctagtttcctgtcaaggtcgct

SEQ ID NO: 39 - DNA, 21 bp, synthetic construct
  source 1..21: mol_type = other DNA
cgacccacctaaaggtattca

SEQ ID NO: 40 - DNA, 24 bp, synthetic construct
  source 1..24: mol_type = other DNA
gttctttagtccagttcccatttc
